(19) United States
(12) Patent Application Publication
(10) Pub. No.: US 2025/0288692 A1
(43) Pub. Date: Sep. 18, 2025

(54) COMPOSITIONS AND METHODS FOR TREATING KCNQ4-ASSOCIATED HEARING LOSS

(71) Applicant: Akouos, Inc., Boston, MA (US)

(72) Inventors: Katherine Diane Gribble, Chestnut Hill, MA (US); Robert Ng, Newton, MA (US); Emmanuel John Simons, Brookline, MA (US); Gregory Scott Robinson, Wilmington, MA (US)

(21) Appl. No.: 18/696,131

(22) PCT Filed: Sep. 29, 2022
(86) PCT No.: PCT/US22/77222

§ 371 Date: Mar. 27, 2024

Related U.S. Application Data
(60) Provisional application No. 63/250,857, filed on Sep. 30, 2021.
(60) Provisional application No. 63/305,740, filed on Feb. 2, 2022.
(60) Provisional application No. 63/309,061, filed on Feb. 11, 2022.

(51) Int. Cl. A61K 48/00; A61P 27/16; C07K 14/47

(52) U.S. Cl. CPC A61K 48/0058; A61P 27/16; C07K 14/4702

(57) ABSTRACT

The present disclosure provides technologies comprising a polynucleotide capable of expressing and/or inhibiting a KCNQ4 gene product.

### CROSS-REFERENCE TO RELATED APPLICATIONS

[0001] The application claims the benefit of U.S. Application Ser. No. 63/250,857 filed on Sep. 30, 2021, U.S. Application Ser. No. 63/305,740 filed on Feb. 2, 2022, and U.S. Application Ser. No. 63/309,061 filed on Feb. 2, 2022, the entire contents of each of which is hereby incorporated by reference.

### SEQUENCE LISTING

[0002] The instant application contains a Sequence Listing which has been submitted electronically in ASCII format and is hereby incorporated by reference in its entirety. Said ASCII copy, created on Sep. 28, 2022, is named ST26_2013615-0534.xml and is 1.07 MB in size.

### BACKGROUND

[0003] There are many types of hearing loss. Some hearing loss is related to one or more genes. The present disclosure provides technologies related to KCNQ4-associated hearing loss.

### SUMMARY

[0004] The present disclosure recognizes that diseases or conditions associated with hearing loss can be treated via, e.g., replacement, addition and/or inhibition of certain gene products. The present disclosure further provides that gene products involved in development, function, and/or maintenance of ear cells, e.g., inner ear cells, e.g., hair cells can be useful for treatment of diseases or conditions associated with cell loss, e.g., hair cell loss. Accordingly, the present disclosure provides various technologies including those for methods of making, using, and/or administering compositions to express a gene product involved in the development, function, and/or maintenance of inner ear cells, e.g., hair cells.

[0005] Technologies provided by the present disclosure also include use of such compositions in treatment of hearing loss, or diseases or conditions associated with hearing loss. In some embodiments, a gene product can be encoded by a Potassium Voltage-Gated Channel Subfamily Q Member 4 (KCNQ4) gene or a characteristic portion thereof. In some embodiments, a gene product can be KCNQ4 protein or a characteristic portion thereof. In some embodiments, a variant KCNQ4 gene product is inhibited. In some embodiments, the present disclosure provides technologies to express functional KCNQ4. In some embodiments, the present disclosure provides technologies to inhibit a KCNQ4 variant. In some embodiments, the present disclosure provides technologies to both express functional KCNQ4 and inhibit a KCNQ4 variant.

[0006] The present disclosure further provides that viral delivery, e.g., via AAV particles, can be useful for administration of compositions to express gene products involved in development, function, and/or maintenance of inner ear cells, and/or treatment of hearing loss, or diseases or conditions associated with hearing loss. As described herein, AAV particles comprise (i) a AAV polynucleotide construct (e.g., a recombinant AAV polynucleotide construct), and (ii) a capsid comprising capsid proteins. In some embodiments, an AAV polynucleotide construct comprises KCNQ4 gene or a characteristic portion thereof. In some embodiments, AAV particles described herein are referred to as rAAV-KCNQ4 or rAAV-KCNQ4 particles. In some embodiments, AAV particles described herein comprise Anc80 AAV capsid proteins and are referred to as rAAV Anc80-KCNQ4 or rAAV Anc80-KCNQ4 particles.

[0007] Among other things, the present disclosure provides a construct comprising a coding sequence operably linked to a promoter, wherein the coding sequence encodes a Kv7.4 protein.

[0008] The present disclosure also provides a construct comprising a coding sequence operably linked to a promoter, wherein the coding sequence encodes a KCNQ4 inhibitory nucleic acid, which comprises a nucleotide sequence complementary to a KCNQ4 gene. In some embodiments, AAV particles described herein are referred to as rAAV-KCNQ4-Inhibitory-RNA or rAAV-KCNQ4-Inhibitory-RNA particles. In some embodiments, AAV particles described herein comprise Anc80 AAV capsid proteins and are referred to as rAAV Anc80-KCNQ4-Inhibitory-RNA or rAAV Anc80-KCNQ4-Inhibitory-RNA particles.

[0009] In some embodiments, the coding sequence is a KCNQ4 gene. In some embodiments, the KCNQ4 gene is a primate KCNQ4 gene. In some embodiments, the KCNQ4 gene is a human KCNQ4 gene. In some embodiments, the KCNQ4 gene is a murine (or mouse) KCNQ4 gene.

[0010] In some embodiments, the human KCNQ4 gene comprises a nucleic acid sequence according to SEQ ID NO: 1, SEQ ID NO: 2, SEQ ID NO: 3, SEQ ID NO: 4, SEQ ID NO: 5, SEQ ID NO: 6, SEQ ID NO: 7, SEQ ID NO: 8, SEQ ID NO: 9, SEQ ID NO: 10, SEQ ID NO: 25, SEQ ID NO: 26, SEQ ID NO: 27, SEQ ID NO: 28, SEQ ID NO: 29, SEQ ID NO: 30, or SEQ ID NO: 90. In some embodiments, the human KCNQ4 gene comprises a nucleic acid sequence according to SEQ ID NO: 9 or 10. In some embodiments, the mouse (or murine) KCNQ4 gene comprises a nucleic acid sequence according to SEQ ID NO: 91.

[0011] In some embodiments, the Kv7.4 protein is a primate Kv7.4 protein. In some embodiments, the Kv7.4 protein is a human Kv7.4 protein. In some embodiments, the Kv7.4 protein is a mouse Kv7.4 protein. In some embodiments, the Kv7.4 protein comprises an amino acid sequence according to SEQ ID NO: 11, SEQ ID NO: 12, SEQ ID NO: 13, or SEQ ID NO: 92.

[0012] In some embodiments, the promoter is an inducible promoter, a constitutive promoter, or a tissue-specific promoter. In some embodiments, a promoter is a cholinergic receptor nicotinic alpha 10 subunit (CHRNA10) promoter, a dynamin 3 (DNM3) promoter, a mucin 15 (MUC15) promoter, a phospholipase B domain containing 1 (PLBD1) promoter, a RAR related orphan receptor B (RORB) promoter, a striatin interacting protein 2 (STRIP2) promoter, an aquaporin 11 (AQP11) promoter, a KCNQ4 promoter, a LBH promoter, a stereocilin (STRC) promoter, a tubulin alpha 8 (TUBA8) promoter, an oncomodulin (OCM) promoter, a truncated (or “short”) OCM promoter, a Prestin promoter, or a truncated (or “short”) Prestin promoter.

[0013] In some embodiments, the promotor is a cochlear hair cell-specific promoter. In some embodiments, the cochlear hair cell-specific promoter is a ATOH1 promoter, a POU4F3 promoter, a LHX3 promoter, a MYO7A promoter, a MYO6 promoter, a α9ACHR promoter, or a α10ACHR promoter. In some embodiments, the promoter is a CAG promoter, a CBA promoter, an smCBA promoter, a CMV promoter, or a CB7 promoter. In some embodiments, the promoter comprises a nucleic acid sequence according to SEQ ID NO: 22, SEQ ID NO: 23, SEQ ID NO: 24, SEQ ID NO: 297, SEQ ID NO: 298, SEQ ID NO: 299, SEQ ID NO: 300, SEQ ID NO: 301, SEQ ID NO: 302, SEQ ID NO: 303, SEQ ID NO: 304, SEQ ID NO: 305, SEQ ID NO: 306, SEQ ID NO: 307, SEQ ID NO: 308, SEQ ID NO: 309, and/or SEQ ID NO: 310.

[0014] In some embodiments, a construct of the present disclosure comprises two AAV inverted terminal repeats (ITRs), wherein the two AAV ITRs flank the coding sequence and promoter. In some embodiments, the two AAV ITRs are or are derived from AAV2 ITRs. In some embodiments, the two AAV ITRs comprise: (i) a 5′ ITR comprising a nucleic acid sequence according to SEQ ID NO: 15 and a 3′ ITR comprising a nucleic acid sequence according to SEQ ID NO: 16. In some embodiments, the two AAV ITRs comprise: (i) a 5′ ITR comprising a nucleic acid sequence according to SEQ ID NO: 19 and a 3′ ITR comprising a nucleic acid sequence according to SEQ ID NO: 20. In some embodiments, the two AAV ITRs comprise: (i) a 5′ ITR comprising a nucleic acid sequence according to SEQ ID NO: 311 and a 3′ ITR comprising a nucleic acid sequence according to SEQ ID NO: 312 or SEQ ID NO: 313. In some embodiments, the construct comprises a nucleic acid sequence according to SEQ ID NO: 1, SEQ ID NO: 2, SEQ ID NO: 3, SEQ ID NO: 4, SEQ ID NO: 5, SEQ ID NO: 6, SEQ ID NO: 7, SEQ ID NO: 8, SEQ ID NO: 9, SEQ ID NO: 10, SEQ ID NO: 25, SEQ ID NO: 26, SEQ ID NO: 27, SEQ ID NO: 28, SEQ ID NO: 29, SEQ ID NO: 30 or SEQ ID NO: 90. In some embodiments, the construct comprises a nucleic acid sequence according to one or more of SEQ ID NOs: 1-41 and/or 42-70 and/or 96-97.

[0015] The present disclosure also provides a construct comprising a coding sequence operably linked to a promoter, wherein the coding sequence encodes a KCNQ4 inhibitory nucleic acid, which comprises a nucleotide sequence complementary to a KCNQ4 gene. In some embodiments, the KCNQ4 inhibitory nucleic acid is an miRNA, an siRNA, or shRNA. In some embodiments, the KCNQ4 inhibitory RNA comprises a sequence according to SEQ ID NO: 42, SEQ ID NO: 43, SEQ ID NO: 44, SEQ ID NO: 45, SEQ ID NO: 46, SEQ ID NO: 47, SEQ ID NO: 48, SEQ ID NO: 49, SEQ ID NO: 50, SEQ ID NO: 51, SEQ ID NO: 52, SEQ ID NO: 53, SEQ ID NO: 54, SEQ ID NO: 55, SEQ ID NO: 56, SEQ ID NO: 57, SEQ ID NO: 58, SEQ ID NO: 59, SEQ ID NO: 60, SEQ ID NO: 61, SEQ ID NO: 62, SEQ ID NO:63, SEQ ID NO: 64, SEQ ID NO: 65, SEQ ID NO: 66, SEQ ID NO: 67, SEQ ID NO: 68, SEQ ID NO: 69, SEQ ID NO: 70, SEQ ID NO: 96, or SEQ ID NO: 97. In some embodiments, the KCNQ4 inhibitory RNA is a gRNA. In some embodiments, the KCNQ4 inhibitory RNA comprises a sequence according to SEQ ID NO: 42, SEQ ID NO: 43, SEQ ID NO: 44, SEQ ID NO: 45, SEQ ID NO: 46, SEQ ID NO: 47, SEQ ID NO: 48. In some embodiments, the promoter is an H1 or U6 promoter.

[0016] In some embodiments, one or more KCNQ4 inhibitory nucleic acids are engineered into a miR scaffold targeting region in a chimeric intron of a construct described herein. For example, in some embodiments, one, two, three, four, five, six, seven, eight, nine, ten, or more KCNQ4 inhibitory nucleic acids are engineered into the miR scaffold targeting region in the chimeric intron of a construct described herein. In some embodiments, one or more KCNQ4 inhibitory nucleic acids are engineered into a miR scaffold targeting region in a 3′ UTR of a construct described herein. For example, in some embodiments, one, two, three, four, five, six, seven, eight, nine, ten, or more KCNQ4 inhibitory nucleic acids are engineered into the miR scaffold targeting region in a 3′ UTR of a construct described herein.

[0017] In some embodiments, the present disclosure provides a construct comprising an inhibitory nucleic acid, wherein the inhibitory nucleic acid is or comprises one or more of miR1-155; miR2-155; miR4-155; miR5-155; miR6-155; miR7-155 miR1-16; miR1-26; miR1-96; miR1-122; miR1-135; miR1-182; miR1-183; miR1-335; miR1-451 and/or an miRNA selected from the group consisting of miR1-155; miR2-155; miR4-155; miR5-155; miR6-155; miR7-155; miR1-16; miR1-26; miR1-96; miR1-122; miR1-135; miR1-182; miR1-183; miR1-335; miR1-451 and combinations thereof. In some embodiments, the present disclosure provides a construct comprising an inhibitory nucleic acid, wherein the inhibitory nucleic acid is or comprises one or more of miR2-26; mir6-26; and combinations thereof.

[0018] In some embodiments, a construct described herein can comprise a sequence according to SEQ ID NO: 332, SEQ ID NO: 333, SEQ ID NO: 334, SEQ ID NO: 335, SEQ ID NO: 336, SEQ ID NO: 337, SEQ ID NO: 338, SEQ ID NO: 339, SEQ ID NO: 340, SEQ ID NO: 341, SEQ ID NO: 342, SEQ ID NO: 343, SEQ ID NO: 344, SEQ ID NO: 345, SEQ ID NO: 346, SEQ ID NO: 347, SEQ ID NO: 348, SEQ ID NO: 349, SEQ ID NO: 350, SEQ ID NO: 351, SEQ ID NO: 352, SEQ ID NO: 353, SEQ ID NO: 354, or SEQ ID NO: 355.

[0019] In some embodiments, a construct described herein comprises a sequence according to SEQ ID NO: 334, SEQ ID NO: 335, SEQ ID NO: 337, SEQ ID NO: 339, SEQ ID NO: 345, SEQ ID NO: 346, SEQ ID NO: 347, SEQ ID NO: 348, SEQ ID NO: 349, SEQ ID NO: 350, SEQ ID NO: 351, SEQ ID NO: 352, SEQ ID NO: 353, SEQ ID NO: 354, or SEQ ID NO: 355, without a FLAG sequence.

[0020] In some embodiments, the present disclosure provides an AAV particle, further comprising a construct as provided herein. In some embodiments, the AAV particle further comprises an AAV capsid, wherein the AAV capsid is or is derived from an AAV2, AAV3, AAV4, AAV5, AAV6, AAV7, AAV8, AAV9, AAV10, AAV-rh8, AAV-rh10, AAV-rh39, AAV-rh43 or AAV Anc80 capsid. In some embodiments, the AAV capsid is an AAV Anc80 capsid.

[0021] In some embodiments, the present disclosure provides a composition comprising at least one construct provided herein. In some embodiments, the composition comprises an AAV particle as provided herein. In some embodiments, a particle of the composition further comprises an AAV capsid, wherein the AAV capsid is or is derived from an AAV2, AAV3, AAV4, AAV5, AAV6, AAV7, AAV8, AAV9, AAV10, AAV-rh8, AAV-rh10, AAV-rh39, AAV-rh43 or AAV Anc80 capsid. In some embodiments, the AAV capsid of the AAV particle is an AAV Anc80 capsid. In some embodiments, the composition is a pharmaceutical composition. In some embodiments, the composition further comprises a pharmaceutically acceptable carrier.

[0022] The present disclosure also provides a cell. In some embodiments, the cell comprises one or more constructs, compositions and/or particles as provided herein. In some embodiments, the cell is in vivo, ex vivo, or in vitro. In some embodiments, the cell is a mammalian cell. In some embodiments, the mammalian cell is a human cell. In some embodiments, the cell is immortalized to generate a stable cell line. In some embodiments, the human cell is in the ear of a subject. In some embodiments, the cell has at least one copy of an endogenous KCNQ4 gene has at least one sequence variation. In some embodiments, the at least one sequence variation results in a loss-of-function gene product.

[0023] In some embodiments, the present disclosure provides a cell comprising a coding sequence operably linked to a promoter, wherein the coding sequence encodes a Kv7.4 protein. In some embodiments, the present disclosure provides a cell comprising a coding sequence operably linked to a promoter, wherein the coding sequence encodes a loss-of-function KCNQ4 variant gene product. In some embodiments, a KCNQ4 gene product is a Kv7.4 protein. In some such embodiments, the present disclosure provides a population of cells comprising one or more cells, wherein the population is or comprises a stable cell line.

[0024] In some embodiments, the inner ear cell is an outer hair cell. In some embodiments, the inner ear cell is in the ear of a subject. In some embodiments, the inner ear cell is in vitro or ex vivo.

[0025] The present disclosure also provides a system. In some embodiments, the system comprises at least one composition as provided herein.

[0026] The present disclosure provides a method comprising contacting an inner ear cell with at least one composition as described herein.

[0027] The present disclosure provides a system, a method, or a kit comprising a device for as described in FIGS. 32-35.

[0028] The present disclosure provides a method comprising contacting an inner ear cell with at least one construct as provided herein and one or more plasmids comprising an AAV Rep gene, AAV Cap gene, AAV VA gene, AAV E2a gene, and AAV E4 gene.

[0029] In some embodiments, the inner ear cell is an outer hair cell. In some embodiments, the inner ear cell is in the ear of a subject. In some embodiments, the inner ear cell is in vitro or ex vivo.

[0030] The present disclosure provides a method comprising introducing at least one composition as provided herein into the inner ear of a subject. In some embodiments, the composition is introduced into the cochlea of the subject. In some embodiments, the composition is introduced via a round window membrane injection.

[0031] In some embodiments, a method of the present disclosure further comprises measuring a hearing level of the subject. In some embodiments, a hearing level is measured by performing an auditory brainstem response (ABR) test. In some embodiments, the method further comprises comparing the hearing level of the subject to a reference hearing level. In some embodiments, a decrease in an ABR threshold, the presences of an ABR threshold, and/or a normal ABR morphology indicates that the subject's hearing level has improved or increased. In some embodiments, the reference hearing level is a published or historical reference hearing level. In some embodiments, the hearing level of the subject is measured after any construct provided herein, and the reference hearing level is a hearing level of the subject that was measured before any construct as provided herein was introduced.

[0032] In some embodiments, a hearing level is measured by performing a distortion product otoacoustic emissions (DPOAE) test. In some embodiments, the method further comprises comparing the hearing level of the subject to a reference hearing level. In some embodiments, a decrease in a DPOAE threshold, the presences of a DPOAE threshold, and/or a normal DPOAE morphology indicates that the subject's hearing level has improved or increased. In some embodiments, the reference hearing level is a published or historical reference hearing level. In some embodiments, the hearing level of the subject is measured after any construct provided herein, and the reference hearing level is a hearing level of the subject that was measured before any construct as provided herein was introduced.

[0033] In some embodiments, the method further comprises measuring a level of a KCNQ4 gene product in a subject. In some embodiments, the level of the KCNQ4 gene product is measured in the inner ear of the subject. In some embodiments, the level of the KCNQ4 gene product is measured in the cochlea of the subject. In some embodiments, the method further comprises comparing the level of a KCNQ4 gene product in the subject to a reference KCNQ4 gene product level. In some embodiments, the reference hearing level is a published or historical reference KCNQ4 gene product level. In some embodiments, the level of a KCNQ4 gene product in the subject is measured after any construct as provided herein is introduced, and the reference KCNQ4 gene product level is a KCNQ4 gene product level of the subject that was measured before any composition as provided herein was introduced.

[0034] The present disclosure also provides a method of treating hearing loss comprising administering at least one composition as provided herein to a subject in need thereof. In some embodiments, the present disclosure provides a method of treating hearing loss comprising administering at least one particle as provided herein, to a subject in need thereof.

[0035] In some embodiments, any constructs as provided herein may be used in the treatment of hearing loss. In some embodiments, any composition as provided herein may be used in the treatment of hearing loss. In some embodiments, any particle as provided herein may be used in the treatment of hearing loss. In some embodiments, the present disclosure provides a use of a construct as provided herein for manufacture of a medicament to treat hearing loss. In some embodiments, the present disclosure provides a use of a composition as provided herein for the manufacture of a medicament to treat hearing loss. In some embodiments, the present disclosure provides a use of a particle as provided herein for the manufacture of a medicament to treat hearing loss.

### Definitions

[0036] The scope of the present disclosure is defined by the claims appended hereto and is not limited by certain embodiments described herein. Those skilled in the art, reading the present specification, will be aware of various modifications that may be equivalent to such described embodiments, or otherwise within the scope of the claims. In general, terms used herein are in accordance with their understood meaning in the art, unless clearly indicated otherwise. Explicit definitions of certain terms are provided below; meanings of these and other terms in particular instances throughout this specification will be clear to those skilled in the art from context.

[0037] Use of ordinal terms such as “first,” “second,” “third,” etc., in the claims to modify a claim element does not by itself connote any priority, precedence, or order of one claim element over another or the temporal order in which acts of a method are performed, but are used merely as labels to distinguish one claim element having a certain name from another element having a same name (but for use of the ordinal term) to distinguish the claim elements.

[0038] The articles “a” and “an,” as used herein, should be understood to include plural referents unless clearly indicated to the contrary. Claims or descriptions that include “or” between one or more members of a group are considered satisfied if one, more than one, or all of the group members are present in, employed in, or otherwise relevant to a given product or process unless indicated to the contrary or otherwise evident from the context. In some embodiments, exactly one member of a group is present in, employed in, or otherwise relevant to a given product or process. In some embodiments, more than one, or all group members are present in, employed in, or otherwise relevant to a given product or process. It is to be understood that the present disclosure encompasses all variations, combinations, and permutations in which one or more limitations, elements, clauses, descriptive terms, etc., from one or more of the listed claims is introduced into another claim dependent on the same base claim (or, as relevant, any other claim) unless otherwise indicated or unless it would be evident to one of ordinary skill in the art that a contradiction or inconsistency would arise. Where elements are presented as lists (e.g., in Markush group or similar format), it is to be understood that each subgroup of the elements is also disclosed, and any element(s) can be removed from the group. It should be understood that, in general, where embodiments or aspects are referred to as “comprising” particular elements, features, etc., certain embodiments or aspects “consist,” or “consist essentially of,” such elements, features, etc. For purposes of simplicity, those embodiments have not in every case been specifically set forth in so many words herein. It should also be understood that any embodiment or aspect can be explicitly excluded from the claims, regardless of whether the specific exclusion is recited in the specification.

[0039] Throughout the specification, whenever a polynucleotide or polypeptide is represented by a sequence of letters (e.g., A, C, G, and T, which denote adenosine, cytidine, guanosine, and thymidine, respectively, in the case of a polynucleotide), such polynucleotides or polypeptides are presented in 5′ to 3′ or N-terminus to C-terminus order, from left to right.

[0040] Administration: As used herein, the term “administration” typically refers to administration of a composition to a subject or system to achieve delivery of an agent to a subject or system. In some embodiments, an agent is, or is included in, a composition; in some embodiments, an agent is generated through metabolism of a composition or one or more components thereof. Those of ordinary skill in the art will be aware of a variety of routes that may, in appropriate circumstances, be utilized for administration to a subject, for example a human. For example, in some embodiments, administration may be systematic or local. In some embodiments, a systematic administration can be intravenous. In some embodiments, administration can be local. Local administration can involve delivery to cochlear perilymph via, e.g., injection through a round-window membrane or into scala-tympani, a scala-media injection through endolymph, perilymph and/or endolymph following canalostomy. In some embodiments, administration may involve only a single dose. In some embodiments, administration may involve application of a fixed number of doses. In some embodiments, administration may involve dosing that is intermittent (e.g., a plurality of doses separated in time) and/or periodic (e.g., individual doses separated by a common period of time) dosing. In some embodiments, administration may involve continuous dosing (e.g., perfusion) for at least a selected period of time.

[0041] Allele: As used herein, the term “allele” refers to one of two or more existing genetic variants of a specific polymorphic genomic locus.

[0042] Amelioration: As used herein, the term “amelioration” refers to prevention, reduction or palliation of a state, or improvement of a state of a subject. Amelioration may include, but does not require, complete recovery or complete prevention of a disease, disorder or condition.

[0043] Amino acid: In its broadest sense, as used herein, the term “amino acid” refers to any compound and/or substance that can be incorporated into a polypeptide chain, e.g., through formation of one or more peptide bonds. In some embodiments, an amino acid has a general structure, e.g., H₂N—C(H)(R)—COOH. In some embodiments, an amino acid is a naturally-occurring amino acid. In some embodiments, an amino acid is a non-natural amino acid; in some embodiments, an amino acid is a D-amino acid; in some embodiments, an amino acid is an L-amino acid. “Standard amino acid” refers to any of the twenty standard L-amino acids commonly found in naturally occurring peptides. “Nonstandard amino acid” refers to any amino acid, other than standard amino acids, regardless of whether it is prepared synthetically or obtained from a natural source. In some embodiments, an amino acid, including a carboxy- and/or amino-terminal amino acid in a polypeptide, can contain a structural modification as compared with general structure as shown above. For example, in some embodiments, an amino acid may be modified by methylation, amidation, acetylation, pegylation, glycosylation, phosphorylation, and/or substitution (e.g., of an amino group, a carboxylic acid group, one or more protons, and/or a hydroxyl group) as compared with a general structure. In some embodiments, such modification may, for example, alter circulating half-life of a polypeptide containing a modified amino acid as compared with one containing an otherwise identical unmodified amino acid. In some embodiments, such modification does not significantly alter a relevant activity of a polypeptide containing a modified amino acid, as compared with one containing an otherwise identical unmodified amino acid.

[0044] Approximately or About: As used herein, the terms “approximately” or “about” may be applied to one or more values of interest, including a value that is similar to a stated reference value. In some embodiments, the term “approximately” or “about” refers to a range of values that fall within ±10% (greater than or less than) of a stated reference value unless otherwise stated or otherwise evident from context (except where such number would exceed 100% of a possible value). For example, in some embodiments, the term “approximately” or “about” may encompass a range of values that within 10%, 9%, 8%, 7%, 6%, 5%, 4%, 3%, 2%, 1%, or less of a reference value.

[0045] Associated: As used herein, the term “associated” describes two events or entities as “associated” with one another, if the presence, level and/or form of one is correlated with that of the other. For example, a particular entity (e.g., polypeptide, genetic signature, metabolite, microbe, etc.) is considered to be associated with a particular disease, disorder, or condition, if its presence, level and/or form correlates with incidence of and/or susceptibility to the disease, disorder, or condition (e.g., across a relevant population). In some embodiments, two or more entities are physically “associated” with one another if they interact, directly or indirectly, so that they are and/or remain in physical proximity with one another. In some embodiments, two or more entities that are physically associated with one another are covalently linked to one another; in some embodiments, two or more entities that are physically associated with one another are not covalently linked to one another but are non-covalently associated, for example by means of hydrogen bonds, van der Waals interaction, hydrophobic interactions, magnetism, and combinations thereof.

[0046] Biologically active: As used herein, the term “biologically active” refers to an observable biological effect or result achieved by an agent or entity of interest. For example, in some embodiments, a specific binding interaction is a biological activity. In some embodiments, modulation (e.g., induction, enhancement, or inhibition) of a biological pathway or event is a biological activity. In some embodiments, presence or extent of a biological activity is assessed through detection of a direct or indirect product produced by a biological pathway or event of interest.

[0047] Characteristic portion: As used herein, the term “characteristic portion,” in the broadest sense, refers to a portion of a substance whose presence (or absence) correlates with presence (or absence) of a particular feature, attribute, or activity of the substance. In some embodiments, a characteristic portion of a substance is a portion that is found in a given substance and in related substances that share a particular feature, attribute or activity, but not in those that do not share the particular feature, attribute or activity. In some embodiments, a characteristic portion shares at least one functional characteristic with the intact substance. For example, in some embodiments, a “characteristic portion” of a protein or polypeptide is one that contains a continuous stretch of amino acids, or a collection of continuous stretches of amino acids, that together are characteristic of a protein or polypeptide. In some embodiments, each such continuous stretch generally contains at least 2, 5, 10, 15, 20, 50, or more amino acids. In general, a characteristic portion of a substance (e.g., of a protein, antibody, etc.) is one that, in addition to a sequence and/or structural identity specified above, shares at least one functional characteristic with the relevant intact substance. In some embodiments, a characteristic portion may be biologically active.

[0048] Characteristic sequence: As used herein, the term “characteristic sequence” is a sequence that is found in all members of a family of polypeptides or nucleic acids, and therefore can be used by those of ordinary skill in the art to define members of the family.

[0049] Characteristic sequence element: As used herein, the phrase “characteristic sequence element” refers to a sequence element found in a polymer (e.g., in a polypeptide or nucleic acid) that represents a characteristic portion of that polymer. In some embodiments, presence of a characteristic sequence element correlates with presence or level of a particular activity or property of a polymer. In some embodiments, presence (or absence) of a characteristic sequence element defines a particular polymer as a member (or not a member) of a particular family or group of such polymers. A characteristic sequence element typically comprises at least two monomers (e.g., amino acids or nucleotides). In some embodiments, a characteristic sequence element includes at least 2, 3, 4, 5, 6, 7, 8, 9, 10, 11, 12, 13, 14, 15, 20, 25, 30, 35, 40, 45, 50, or more monomers (e.g., contiguously linked monomers). In some embodiments, a characteristic sequence element includes at least first and second stretches of contiguous monomers spaced apart by one or more spacer regions whose length may or may not vary across polymers that share a sequence element.

[0050] Cleavage: As used herein, the term “cleavage” refers to generation of a break in DNA. For example, in some embodiments, cleavage could refer to either a single-stranded break or a double-stranded break depending on a type of nuclease that may be employed to cause such a break.

[0051] Combination therapy: As used herein, the term “combination therapy” refers to those situations in which a subject is simultaneously exposed to two or more therapeutic regimens (e.g., two or more therapeutic agents). In some embodiments, two or more agents may be administered simultaneously. In some embodiments, two or more agents may be administered sequentially. In some embodiments, two or more agents may be administered in overlapping dosing regimens.

[0052] Comparable: As used herein, the term “comparable” refers to two or more agents, entities, situations, sets of conditions, subjects, populations, etc., that may not be identical to one another but that are sufficiently similar to permit comparison therebetween so that one skilled in the art will appreciate that conclusions may reasonably be drawn based on differences or similarities observed. In some embodiments, comparable sets of agents, entities, situations, sets of conditions, subjects, populations, etc. are characterized by a plurality of substantially identical features and one or a small number of varied features. Those of ordinary skill in the art will understand, in context, what degree of identity is required in any given circumstance for two or more such agents, entities, situations, sets of conditions, subjects, populations, etc. to be considered comparable. For example, those of ordinary skill in the art will appreciate that sets of agents, entities, situations, sets of conditions, subjects, populations, etc. are comparable to one another when characterized by a sufficient number and type of substantially identical features to warrant a reasonable conclusion that differences in results obtained or phenomena observed under or with different sets of circumstances, stimuli, agents, entities, situations, sets of conditions, subjects, populations, etc. are caused by or indicative of the variation in those features that are varied.

[0053] Construct: As used herein, the term “construct” refers to a composition including a polynucleotide capable of carrying at least one heterologous polynucleotide. In some embodiments, a construct can be a plasmid, a transposon, a cosmid, an artificial chromosome (e.g., a human artificial chromosome (HAC), a yeast artificial chromosome (YAC), a bacterial artificial chromosome (BAC), or a P1-derived artificial chromosome (PAC)) or a viral construct, and any Gateway® plasmids. A construct can, e.g., include sufficient cis-acting elements for expression; other elements for expression can be supplied by the host primate cell or in an in vitro expression system. A construct may include any genetic element (e.g., a plasmid, a transposon, a cosmid, an artificial chromosome, or a viral construct, etc.) that is capable of replicating when associated with proper control elements. Thus, in some embodiments, “construct” may include a cloning and/or expression construct and/or a viral construct (e.g., an adeno-associated virus (AAV) construct, an adenovirus construct, a lentivirus construct, or a retrovirus construct).

[0054] Conservative: As used herein, the term “conservative” refers to instances describing a conservative amino acid substitution, including a substitution of an amino acid residue by another amino acid residue having a side chain R group with similar chemical properties (e.g., charge or hydrophobicity). In general, a conservative amino acid substitution will not substantially change functional properties of interest of a protein, for example, ability of a receptor to bind to a ligand. Examples of groups of amino acids that have side chains with similar chemical properties include: aliphatic side chains such as glycine (Gly, G), alanine (Ala, A), valine (Val, V), leucine (Leu, L), and isoleucine (Ile, I); aliphatic-hydroxyl side chains such as serine (Ser, S) and threonine (Thr, T); amide-containing side chains such as asparagine (Asn, N) and glutamine (Gln, Q); aromatic side chains such as phenylalanine (Phe, F), tyrosine (Tyr, Y), and tryptophan (Trp, W); basic side chains such as lysine (Lys, K), arginine (Arg, R), and histidine (His, H); acidic side chains such as aspartic acid (Asp, D) and glutamic acid (Glu, E); and sulfur-containing side chains such as cysteine (Cys, C) and methionine (Met, M). Conservative amino acids substitution groups include, for example, valine/leucine/isoleucine (Val/Leu/Ile, V/L/I), phenylalanine/tyrosine (Phe/Tyr, F/Y), lysine/arginine (Lys/Arg, K/R), alanine/valine (Ala/Val, A/V), glutamate/aspartate (Glu/Asp, E/D), and asparagine/glutamine (Asn/Gln, N/Q). In some embodiments, a conservative amino acid substitution can be a substitution of any native residue in a protein with alanine, as used in, for example, alanine scanning mutagenesis. In some embodiments, a conservative substitution is made that has a positive value in the PAM250 log-likelihood matrix disclosed in Gonnet et al., 1992, Science 256:1443-1445, which is incorporated herein by reference in its entirety. In some embodiments, a substitution is a moderately conservative substitution wherein the substitution has a nonnegative value in the PAM250 log-likelihood matrix. One skilled in the art would appreciate that a change (e.g., substitution, addition, deletion, etc.) of amino acids that are not conserved between the same protein from different species is less likely to have an effect on the function of a protein and therefore, these amino acids should be selected for mutation. Amino acids that are conserved between the same protein from different species should not be changed (e.g., deleted, added, substituted, etc.), as these mutations are more likely to result in a change in function of a protein.

CONSERVATIVE AMINO ACID SUBSTITUTIONS

| For Amino Acid | Code | Replace With |
|---|---|---|
| Alanine | A | D-ala, Gly, Aib, β-Ala, Acp, L-Cys, D-Cys |
| Arginine | R | D-Arg, Lys, D-Lys, homo-Arg, D-homo-Arg, Met, Ile, |
| | | D-Met, D-Ile, Orn, D-Orn |
| Asparagine | N | D-Asn, Asp, D-Asp, Glu, D-Glu, Gln, D-Gln |
| Aspartic Acid | D | D-Asp, D-Asn, Asn, Glu, D-Glu, Gln, D-Gln |
| Cysteine | C | D-Cys, S-Me-Cys, Met, D-Met, Thr, D-Thr |
| Glutamine | Q | D-Gln, Asn, D-Asn, Glu, D-Glu, Asp, D-Asp |
| Glutamic Acid | E | D-Glu, D-Asp, Asp, Asn, D-Asn, Gln, D-Gln |
| Glycine | G | Ala, D-Ala, Pro, D-Pro, Aib, β-Ala, Acp |
| Isoleucine | I | D-Ile, Val, D-Val, AdaA, AdaG, Leu, D-Leu, Met, D- |
| | | Met |
| Leucine | L | D-Leu, Val, D-Val, AdaA, AdaG, Leu, D-Leu, Met, D- |
| | | Met |
| Lysine | K | D-Lys, Arg, D-Arg, homo-Arg, D-homo-Arg, Met, D- |
| | | Met, Ile, D-Ile, Orn, D-Orn |
| Methionine | M | D-Met, S-Me-Cys, Ile, D-Ile, Leu, D-Leu, Val, D-Val |
| Phenylalanine | F | D-Phe, Tyr, D-Thr, L-Dopa, His, D-His, Trp, D-Trp, |
| | | Trans-3,4 or 5-phenylproline, AdaA, AdaG, cis-3,4 or |
| | | 5-phenylproline, Bpa, D-Bpa |
| Proline | P | D-Pro, L-I-thioazolidine-4-carboxylic acid, D-or-L-1- |
| | | oxazolidine-4-carboxylic acid (Kauer, U.S. Pat. No. |
| | | 4,511,390) |
| Serine | S | D-Ser, Thr, D-Thr, allo-Thr, Met, D-Met, Met (O), D- |
| | | Met (O), L-Cys, D-Cys |
| Threonine | T | D-Thr, Ser, D-Ser, allo-Thr, Met, D-Met, Met (O), D- |
| | | Met (O), Val, D-Val |
| Tyrosine | Y | D-Tyr, Phe, D-Phe, L-Dopa, His, D-His |
| Valine | V | D-Val, Leu, D-Leu, Ile, D-Ile, Met, D-Met, AdaA, |
| | | AdaG |

[0055] Control: As used herein, the term “control” refers to the art-understood meaning of a “control” being a standard against which results are compared. Typically, controls are used to augment integrity in experiments by isolating variables in order to make a conclusion about such variables. In some embodiments, a control is a reaction or assay that is performed simultaneously with a test reaction or assay to provide a comparator. For example, in one experiment, a “test” (i.e., a variable being tested) is applied. In a second experiment, a “control,” the variable being tested is not applied. In some embodiments, a control is a historical control (e.g., of a test or assay performed previously, or an amount or result that is previously known). In some embodiments, a control is or comprises a printed or otherwise saved record. In some embodiments, a control is a positive control. In some embodiments, a control is a negative control.

[0056] Determining, measuring, evaluating, assessing, assaying and analyzing: As used herein, the terms “determining,” “measuring,” “evaluating,” “assessing,” “assaying,” and “analyzing” may be used interchangeably to refer to any form of measurement, and include determining if an element is present or not. These terms include both quantitative and/or qualitative determinations. Assaying may be relative or absolute. For example, in some embodiments, “Assaying for the presence of” can be determining an amount of something present and/or determining whether or not it is present or absent.

[0057] Editing: As used herein, the term “edit,” “editing,” or “edited” refers to a method of altering a nucleic acid sequence of a polynucleotide (e.g., a wild type naturally occurring nucleic acid sequence or a mutated naturally occurring sequence) by selective deletion of a specific nucleic acid sequence (e.g., a genomic target sequence), a given specific inclusion of new sequence through use of an exogenous nucleic acid sequence, or a replacement of nucleic acid sequence with an exogenous nucleic acid sequence. In some embodiments, such a specific genomic target includes, but may be not limited to, a chromosomal region, mitochondrial DNA, a gene, a promoter, an open reading frame or any nucleic acid sequence.

[0058] Engineered: In general, as used herein, the term “engineered” refers to an aspect of having been manipulated by the hand of man. For example, a cell or organism is considered to be “engineered” if it has been manipulated so that its genetic information is altered (e.g., new genetic material not previously present has been introduced, for example by transformation, mating, somatic hybridization, transfection, transduction, or other mechanism, or previously present genetic material is altered or removed, for example by substitution or deletion mutation, or by mating protocols). As is common practice and is understood by those in the art, progeny of an engineered polynucleotide or cell are typically still referred to as “engineered” even though the actual manipulation was performed on a prior entity.

[0059] Excipient: As used herein, the term “excipient” refers to an inactive (e.g., non-therapeutic) agent that may be included in a pharmaceutical composition, for example to provide or contribute to a desired consistency or stabilizing effect. In some embodiments, suitable pharmaceutical excipients may include, for example, starch, glucose, lactose, sucrose, gelatin, malt, rice, flour, chalk, silica gel, sodium stearate, glycerol monostearate, talc, sodium chloride, dried skim milk, glycerol, propylene, glycol, water, ethanol and the like.

[0060] Expression: As used herein, the term “expression” of a nucleic acid sequence refers to generation of any gene product (e.g., transcript, e.g., mRNA, e.g., polypeptide, etc.) from a nucleic acid sequence. In some embodiments, a gene product can be a transcript. In some embodiments, a gene product can be a polypeptide. In some embodiments, expression of a nucleic acid sequence involves one or more of the following: (1) production of an RNA template from a DNA sequence (e.g., by transcription); (2) processing of an RNA transcript (e.g., by splicing, editing, 5′ cap formation, and/or 3′ end formation); (3) translation of an RNA into a polypeptide or protein; and/or (4) post-translational modification of a polypeptide or protein.

[0061] Functional: As used herein, the term “functional” describes something that exists in a form in which it exhibits a property and/or activity by which it is characterized. For example, in some embodiments, a “functional” biological molecule is a biological molecule in a form in which it exhibits a property and/or activity by which it is characterized. In some such embodiments, a functional biological molecule is characterized relative to another biological molecule which is non-functional in that the “non-functional” version does not exhibit the same or equivalent property and/or activity as the “functional” molecule. A biological molecule may have one function, two functions (i.e., bifunctional) or many functions (i.e., multifunctional).

[0062] Gene: As used herein, the term “gene” refers to a DNA sequence in a chromosome that codes for a gene product (e.g., an RNA product, e.g., a polypeptide product). In some embodiments, a gene includes coding sequence (i.e., sequence that encodes a particular product). In some embodiments, a gene includes non-coding sequence. In some particular embodiments, a gene may include both coding (e.g., exonic) and non-coding (e.g., intronic) sequence. In some embodiments, a gene may include one or more regulatory sequences (e.g., promoters, enhancers, etc.) and/or intron sequences that, for example, may control or impact one or more aspects of gene expression (e.g., cell-type-specific expression, inducible expression, etc.). As used herein, the term “gene” generally refers to a portion of a nucleic acid that encodes a polypeptide or fragment thereof, the term may optionally encompass regulatory sequences, as will be clear from context to those of ordinary skill in the art. This definition is not intended to exclude application of the term “gene” to non-protein-coding expression units but rather to clarify that, in most cases, the term as used in this document refers to a polypeptide-coding nucleic acid. In some embodiments, a gene may encode a polypeptide, but that polypeptide may not be functional, e.g., a gene variant may encode a polypeptide that does not function in the same way, or at all, relative to the wild-type gene. In some embodiments, a gene may encode a transcript which, in some embodiments, may be toxic beyond a threshold level. In some embodiments, a gene may encode a polypeptide, but that polypeptide may not be functional and/or may be toxic beyond a threshold level.

[0063] Genome Editing System: As used herein, the term “genome editing system” refers to any system having DNA editing activity. Among other things, DNA editing activity can include deleting, replacing, or inserting a DNA sequence in a genome. In some embodiments, a genome editing system comprises RNA-guided DNA editing activity. In some embodiments, a genome editing system of the present disclosure includes more than one component. In some embodiments, a genome editing system includes at least two components adapted from naturally occurring CRISPR systems: a guide RNA (gRNA) and an RNA-guided nuclease. In certain embodiments, these two components form a complex that is capable of associating with a specific nucleic acid sequence and editing DNA in or around that nucleic acid sequence, for instance by making one or more of a single-strand break (an SSB or nick), a double-strand break (a DSB) and/or a point mutation. In some embodiments, genome editing systems of the present disclosure lack a component having cleavage activity but maintain a component(s) having DNA binding activity. In some such embodiments, a genome editing system of the present disclosure comprises a component(s) that functions as an inhibitor of DNA activity, e.g., transcription, translation, etc. In some embodiments, a genome editing system of the present disclosure comprises a component(s) fused to modulators to modulate target DNA expression.

[0064] Genomic modification: As used herein, the term “genomic modification” refers to a change made in a genomic region of a cell that permanently alters a genome (e.g., an endogenous genome) of that cell. In some embodiments, such changes are in vitro, ex vivo, or in vivo. In some embodiments, every cell in a living organism is modified. In some embodiments, only a particular set of cells such as, e.g., in a specific organ, is modified. For example, in some embodiments, a genome is modified by deletion, substitution, or addition of one or more nucleotides from one or more genomic regions. In some embodiments, a genomic modification is performed in a stem cell or undifferentiated cell. In some such embodiments, progeny of a genomically modified cell or organism will also be genomically modified, relative to a parental genome prior to modification. In some embodiments, a genomic modification is performed on a mature or post-mitotic cell such that no progeny will be generated and thus, no genomic modifications propagated other than in a particular cell.

[0065] Hearing loss: As used herein, the term “hearing loss” may be used to a partial or total inability of a living organism to hear. In some embodiments, hearing loss may be acquired. In some embodiments, hearing loss may be hereditary. In some embodiments, hearing loss may be genetic. In some embodiments, hearing loss may be as a result of disease or trauma (e.g., physical trauma, treatment with one or more agents resulting in hearing loss, etc.). In some embodiments, hearing loss may be due to one or more known genetic causes and/or syndromes. In some embodiments, hearing loss may be of unknown etiology. In some embodiments, hearing loss may or may not be mitigated by use of hearing aids or other treatments.

[0066] Heterologous: As used herein, the term “heterologous” may be used in reference to one or more regions of a particular molecule as compared to another region and/or another molecule. For example, in some embodiments, heterologous polypeptide domains, refers to the fact that polypeptide domains do not naturally occur together (e.g., in the same polypeptide). For example, in fusion proteins generated by the hand of man, a polypeptide domain from one polypeptide may be fused to a polypeptide domain from a different polypeptide. In such a fusion protein, two polypeptide domains would be considered “heterologous” with respect to each other, as they do not naturally occur together.

[0067] Identity: As used herein, the term “identity” refers to overall relatedness between polymeric molecules, e.g., between nucleic acid molecules (e.g., DNA molecules and/or RNA molecules) and/or between polypeptide molecules. In some embodiments, polymeric molecules are considered to be “substantially identical” to one another if their sequences are at least 25%, 30%, 35%, 40%, 45%, 50%, 55%, 60%, 65%, 70%, 75%, 80%, 85%, 90%, 95%, or 99% identical. Calculation of percent identity of two nucleic acid or polypeptide sequences, for example, can be performed by aligning two sequences for optimal comparison purposes (e.g., gaps can be introduced in one or both of a first and a second sequences for optimal alignment and non-identical sequences can be disregarded for comparison purposes). In some embodiments, a length of a sequence aligned for comparison purposes is at least 30%, at least 40%, at least 50%, at least 60%, at least 70%, at least 80%, at least 90%, at least 95%, or substantially 100% of length of a reference sequence; nucleotides at corresponding positions are then compared. When a position in the first sequence is occupied by the same residue (e.g., nucleotide or amino acid) as a corresponding position in the second sequence, then the two molecules (i.e., first and second) are identical at that position. Percent identity between two sequences is a function of the number of identical positions shared by the two sequences being compared, taking into account the number of gaps, and the length of each gap, which needs to be introduced for optimal alignment of the two sequences. Comparison of sequences and determination of percent identity between two sequences can be accomplished using a mathematical algorithm. For example, percent identity between two nucleotide sequences can be determined using the algorithm of Meyers and Miller (CABIOS, 1989, 4: 11-17, which is herein incorporated by reference in its entirety), which has been incorporated into the ALIGN program (version 2.0). In some embodiments, nucleic acid sequence comparisons made with the ALIGN program use a PAM120 weight residue table, a gap length penalty of 12 and a gap penalty of 4.

[0068] Inhibitory nucleic acid: As used herein, the term “inhibitory nucleic acid” refers to a nucleic acid sequence that hybridizes specifically to a target gene, including target DNA or RNA (e.g., a target mRNA (e.g., a potassium channel gene product, e.g., a potassium channel mRNA, e.g., KCNQ4 mRNA)). Thereby, in some embodiments, an inhibitory nucleic acid inhibits expression and/or activity of a target gene. In some embodiments, an inhibitory nucleic acid is a short interfering RNA (siRNA), a short hairpin RNA (shRNA), a microRNA (or “miRNA”), an antisense oligonucleotide, a guide RNA (gRNA), or a ribozyme. In some embodiments, an inhibitory nucleic acid is between about 10 nucleotides to about 30 nucleotides in length (e.g., about 10 nucleotides to about 28 nucleotides, about 10 nucleotides to about 26 nucleotides, about 10 nucleotides to about 24 nucleotides, about 10 nucleotides to about 22 nucleotides, about 10 nucleotides to about 20 nucleotides, about 10 nucleotides to about 18 nucleotides, about 10 nucleotides to about 16 nucleotides, about 10 nucleotides to about 14 nucleotides, about 10 nucleotides to about 12 nucleotides, about 12 nucleotides to about 30 nucleotides, about 12 nucleotides to about 28 nucleotides, about 12 nucleotides to about 26 nucleotides, about 12 nucleotides to about 24 nucleotides, about 12 nucleotides to about 22 nucleotides, about 12 nucleotides to about 20 nucleotides, about 12 nucleotides to about 18 nucleotides, about 12 nucleotides to about 16 nucleotides, about 12 nucleotides to about 14 nucleotides, about 16 nucleotides to about 30 nucleotides, about 16 nucleotides to about 28 nucleotides, about 16 nucleotides to about 26 nucleotides, about 16 nucleotides to about 24 nucleotides, about 16 nucleotides to about 22 nucleotides, about 16 nucleotides to about 20 nucleotides, about 16 nucleotides to about 18 nucleotides, about 18 nucleotides to about 30 nucleotides, about 18 nucleotides to about 28 nucleotides, about 18 nucleotides to about 26 nucleotides, about 18 nucleotides to about 24 nucleotides, about 18 nucleotides to about 22 nucleotides, about 18 nucleotides to about 20 nucleotides, about 20 nucleotides to about 30 nucleotides, about 20 nucleotides to about 28 nucleotides, about 20 nucleotides to about 26 nucleotides, about 20 nucleotides to about 24 nucleotides, about 20 nucleotides to about 22 nucleotides, about 22 nucleotides to about 30 nucleotides, about 22 nucleotides to about 28 nucleotides, about 22 nucleotides to about 26 nucleotides, about 22 nucleotides to about 24 nucleotides, about 24 nucleotides to about 30 nucleotides, about 24 nucleotides to about 28 nucleotides, about 24 nucleotides to about 26 nucleotides, about 26 nucleotides to about 30 nucleotides, about 26 nucleotides to about 28 nucleotides, about 28 nucleotides to about 30 nucleotides, or 11, 12, 13, 14, 15, 16, 17, 18, 19, 20, 21, 22, 23, 24, 25, 26, 27, 28, 29 or 30 nucleotides). In some embodiments, an inhibitory nucleic acid is an inhibitory RNA that targets KCNQ4. In some such embodiments, an inhibitory KCNQ4 RNA hybridizes specifically to a target on a KCNQ4. In some such embodiments, a KCNQ4 inhibitory RNA includes, e.g., an inhibitory nucleic acid is a short interfering RNA (siRNA), a short hairpin RNA (shRNA), a microRNA (miRNA), an antisense oligonucleotide, a guide RNA (gRNA), or a ribozyme. In some embodiments, hybridizing of an inhibitory KCNQ4 RNA reduces expression of a KCNQ4 gene product. Exemplary KCNQ4 inhibitory RNA sequences are provided herein.

[0069] Improve, increase, enhance, inhibit or reduce: As used herein, the terms “improve,” “increase,” “enhance,” “inhibit,” “reduce,” or grammatical equivalents thereof, indicate values that are relative to a baseline or other reference measurement. In some embodiments, a value is statistically significantly difference that a baseline or other reference measurement. In some embodiments, an appropriate reference measurement may be or comprise a measurement in a particular system (e.g., in a single individual) under otherwise comparable conditions absent presence of (e.g., prior to and/or after) a particular agent or treatment, or in presence of an appropriate comparable reference agent. In some embodiments, an appropriate reference measurement may be or comprise a measurement in comparable system known or expected to respond in a particular way, in presence of the relevant agent or treatment. In some embodiments, an appropriate reference is a negative reference; in some embodiments, an appropriate reference is a positive reference.

[0070] Knockdown: As used herein, the term “knockdown” refers to a decrease in expression of one or more gene products. In some embodiments, an inhibitory nucleic acid achieve knockdown. In some embodiments, a genome editing system described herein achieves knockdown.

[0071] Knockout: As used herein, the term “knockout” refers to ablation of expression of one or more gene products. In some embodiments, a genome editing system described herein achieve knockout.

[0072] Modulating: As used herein, the term “modulating,” means mediating a detectable increase or decrease in a level of a response in a subject compared with a level of a response in a subject in absence of a treatment or compound, and/or compared with a level of a response in an otherwise identical but untreated subject. The term encompasses perturbing and/or affecting a native signal or response thereby mediating a beneficial therapeutic response in a subject, preferably, a human.

[0073] Nuclease: As used herein, the term “nuclease” refers to an agent, for example a protein or a small molecule, capable of cleaving a phosphodiester bond connecting nucleotide residues in a nucleic acid molecule. In some embodiments, a nuclease is a protein, e.g., an enzyme that can bind a nucleic acid molecule and cleave a phosphodiester bond connecting nucleotide residues within the nucleic acid molecule. A nuclease may be an endonuclease, cleaving a phosphodiester bonds within a polynucleotide chain, or an exonuclease, cleaving a phosphodiester bond at the end of the polynucleotide chain. In some embodiments, a nuclease is a site-specific nuclease, binding and/or cleaving a specific phosphodiester bond within a specific nucleotide sequence, which is also referred to herein as the “recognition sequence,” the “nuclease target site,” or the “target site.” In some embodiments, a nuclease is a RNA-guided (i.e., RNA-programmable) nuclease, which complexes with (e.g., binds with) an RNA having a sequence that complements a target site, thereby providing the sequence specificity of a nuclease. In some embodiments, a nuclease recognizes a single stranded target site, while in other embodiments, a nuclease recognizes a double-stranded target site, for example a double-stranded DNA target site. Target sites of many naturally occurring nucleases, for example, many naturally occurring DNA restriction nucleases, are well known to those of skill in the art. In many cases, a DNA nuclease, such as EcoRI, HindIII, or BamHI, recognize a palindromic, double-stranded DNA target site of 4 to 10 base pairs in length, and cut each of the two DNA strands at a specific position within a target site. Some endonucleases cut a double-stranded nucleic acid target site symmetrically, i.e., cutting both strands at the same position so that the ends comprise base-paired nucleotides, also referred to herein as blunt ends. Other endonucleases cut a double-stranded nucleic acid target sites asymmetrically, i.e., cutting each strand at a different position so that the ends comprise unpaired nucleotides. Unpaired nucleotides at an end of a double-stranded DNA molecule are also referred to as “overhangs,” e.g., as “5′-overhang” or as “3′-overhang,” depending on whether unpaired nucleotide(s) form(s) the 5′ or the 3′ end of a given DNA strand. Double-stranded DNA molecule ends ending with unpaired nucleotide(s) are also referred to as sticky ends, as they can “stick to” other double-stranded DNA molecule ends comprising complementary unpaired nucleotide(s). A nuclease protein typically comprises a “binding domain” that mediates interaction of a protein with a nucleic acid substrate, and also, in some cases, specifically binds to a target site, and a “cleavage domain” that catalyzes the cleavage of a phosphodiester bond within a nucleic acid backbone. In some embodiments, a nuclease protein can bind and cleave a nucleic acid molecule in a monomeric form, while, in other embodiments, a nuclease protein has to dimerize or multimerize in order to cleave a target nucleic acid molecule. Binding domains and cleavage domains of naturally occurring nucleases, as well as modular binding domains and cleavage domains that can be fused to create nucleases binding specific target sites, are well known to those of skill in the art.

[0074] Nucleic acid: As used herein, the term “nucleic acid”, in its broadest sense, refers to any compound and/or substance that is or can be incorporated into an oligonucleotide chain. In some embodiments, a nucleic acid is a compound and/or substance that is or can be incorporated into an oligonucleotide chain via a phosphodiester linkage. As will be clear from context, in some embodiments, “nucleic acid” refers to an individual nucleic acid residue (e.g., a nucleotide and/or nucleoside); in some embodiments, “nucleic acid” refers to an oligonucleotide chain comprising individual nucleic acid residues. In some embodiments, a “nucleic acid” is or comprises RNA; in some embodiments, a “nucleic acid” is or comprises DNA. In some embodiments, a nucleic acid is, comprises, or consists of one or more natural nucleic acid residues. In some embodiments, a nucleic acid is, comprises, or consists of one or more nucleic acid analogs. In some embodiments, a nucleic acid analog differs from a nucleic acid in that it does not utilize a phosphodiester backbone. Alternatively or additionally, in some embodiments, a nucleic acid has one or more phosphorothioate and/or 5′-N-phosphoramidite linkages rather than phosphodiester bonds. In some embodiments, a nucleic acid is, comprises, or consists of one or more natural nucleosides (e.g., adenosine, thymidine, guanosine, cytidine, uridine, deoxyadenosine, deoxythymidine, deoxy guanosine, and deoxycytidine). In some embodiments, a nucleic acid is, comprises, or consists of one or more nucleoside analogs (e.g., 2-aminoadenosine, 2-thiothymidine, inosine, pyrrolo-pyrimidine, 3-methyl adenosine, 5-methylcytidine, C-5 propynyl-cytidine, C-5 propynyl-uridine, 2-aminoadenosine, C5-bromouridine, C5-fluorouridine, C5-iodouridine, C5-propynyl-uridine, C5-propynyl-cytidine, C5-methylcytidine, 2-aminoadenosine, 7-deazaadenosine, 7-deazaguanosine, 8-oxoadenosine, 8-oxoguanosine, 0(6)-methylguanine, 2-thiocytidine, methylated bases, intercalated bases, and combinations thereof). In some embodiments, a nucleic acid comprises one or more modified sugars (e.g., 2′-fluororibose, ribose, 2′-deoxyribose, arabinose, and hexose) as compared with those in natural nucleic acids. In some embodiments, a nucleic acid has a nucleotide sequence that encodes a functional gene product such as an RNA or protein. In some embodiments, a nucleic acid includes one or more introns. In some embodiments, nucleic acids are prepared by one or more of isolation from a natural source, enzymatic synthesis by polymerization based on a complementary template (in vivo or in vitro), reproduction in a recombinant cell or system, and chemical synthesis. In some embodiments, a nucleic acid is at least 3, 4, 5, 6, 7, 8, 9, 10, 15, 20, 25, 30, 35, 40, 45, 50, 55, 60, 65, 70, 75, 80, 85, 90, 95, 100, 1 10, 120, 130, 140, 150, 160, 170, 180, 190, 20, 225, 250, 275, 300, 325, 350, 375, 400, 425, 450, 475, 500, 600, 700, 800, 900, 1000, 1500, 2000, 2500, 3000, 3500, 4000, 4500, 5000 or more residues long. In some embodiments, a nucleic acid is partly or wholly single stranded; in some embodiments, a nucleic acid is partly or wholly double stranded. In some embodiments, a nucleic acid has a nucleotide sequence comprising at least one element that encodes, or is complementary to a sequence that encodes, a polypeptide. In some embodiments, a nucleic acid has enzymatic activity.

[0075] Operably linked: As used herein, refers to a juxtaposition wherein the components described are in a relationship permitting them to function in their intended manner. A control element “operably linked” to a functional element is associated in such a way that expression and/or activity of the functional element is achieved under conditions compatible with the control element. In some embodiments, “operably linked” control elements are contiguous (e.g., covalently linked) with coding elements of interest; in some embodiments, control elements act in trans to or otherwise at a from the functional element of interest. In some embodiments, “operably linked” refers to functional linkage between a regulatory sequence and a heterologous nucleic acid sequence resulting in expression of the latter. For example, a first nucleic acid sequence is operably linked with a second nucleic acid sequence when the first nucleic acid sequence is placed in a functional relationship with the second nucleic acid sequence. In some embodiments, for example, a functional linkage may include transcriptional control. For instance, a promoter is operably linked to a coding sequence if the promoter affects the transcription or expression of the coding sequence. Operably linked DNA sequences can be contiguous with each other and, e.g., where necessary to join two protein coding regions, are in the same reading frame.

[0076] Pharmaceutical composition: As used herein, the term “pharmaceutical composition” refers to a composition in which an active agent is formulated together with one or more pharmaceutically acceptable carriers. In some embodiments, an active agent is present in unit dose amount appropriate for administration in a therapeutic regimen that shows a statistically significant probability of achieving a predetermined therapeutic effect when administered to a relevant population. In some embodiments, a pharmaceutical composition may be specially formulated for administration in solid or liquid form, including those adapted for, e.g., administration, for example, an injectable formulation that is, e.g., an aqueous or non-aqueous solution or suspension or a liquid drop designed to be administered into an ear canal. In some embodiments, a pharmaceutical composition may be formulated for administration via injection either in a particular organ or compartment, e.g., directly into an ear, or systemic, e.g., intravenously. In some embodiments, a formulation may be or comprise drenches (aqueous or non-aqueous solutions or suspensions), tablets, boluses, powders, granules, pastes, capsules, powders, etc. In some embodiments, an active agent may be or comprise an isolated, purified, or pure compound.

[0077] Pharmaceutically acceptable: As used herein, the term “pharmaceutically acceptable” which, for example, may be used in reference to a carrier, diluent, or excipient used to formulate a pharmaceutical composition as disclosed herein, means that a carrier, diluent, or excipient is compatible with other ingredients of a composition and not deleterious to a recipient thereof.

[0078] Pharmaceutically acceptable carrier: As used herein, the term “pharmaceutically acceptable carrier” means a pharmaceutically-acceptable material, composition or vehicle, such as a liquid or solid filler, diluent, excipient, or solvent encapsulating material, involved in carrying or transporting a subject compound from one organ, or portion of a body, to another organ, or portion of a body. Each carrier must be is “acceptable” in the sense of being compatible with other ingredients of a formulation and not injurious to a patient. Some examples of materials which can serve as pharmaceutically-acceptable carriers include: sugars, such as lactose, glucose and sucrose; starches, such as corn starch and potato starch; cellulose, and its derivatives, such as sodium carboxymethyl cellulose, ethyl cellulose and cellulose acetate; powdered tragacanth; malt; gelatin; talc; excipients, such as cocoa butter and suppository waxes; oils, such as peanut oil, cottonseed oil, safflower oil, sesame oil, olive oil, corn oil and soybean oil; glycols, such as propylene glycol; polyols, such as glycerin, sorbitol, mannitol and polyethylene glycol; esters, such as ethyl oleate and ethyl laurate; agar; buffering agents, such as magnesium hydroxide and aluminum hydroxide; alginic acid; pyrogen-free water; isotonic saline; Ringer's solution; ethyl alcohol; pH buffered solutions; polyesters, polycarbonates and/or polyanhydrides; and other non-toxic compatible substances employed in pharmaceutical formulations.

[0079] Polypeptide: As used herein, the term “polypeptide” refers to any polymeric chain of residues (e.g., amino acids) that are typically linked by peptide bonds. In some embodiments, a polypeptide has an amino acid sequence that occurs in nature. In some embodiments, a polypeptide has an amino acid sequence that does not occur in nature. In some embodiments, a polypeptide has an amino acid sequence that is engineered in that it is designed and/or produced through action of the hand of man. In some embodiments, a polypeptide may comprise or consist of natural amino acids, non-natural amino acids, or both. In some embodiments, a polypeptide may include one or more pendant groups or other modifications, e.g., modifying or attached to one or more amino acid side chains, at a polypeptide's N-terminus, at a polypeptide's C-terminus, or any combination thereof. In some embodiments, such pendant groups or modifications may be acetylation, amidation, lipidation, methylation, pegylation, etc., including combinations thereof. In some embodiments, polypeptides may contain L-amino acids, D-amino acids, or both and may contain any of a variety of amino acid modifications or analogs known in the art. In some embodiments, useful modifications may be or include, e.g., terminal acetylation, amidation, methylation, etc. In some embodiments, a protein may comprise natural amino acids, non-natural amino acids, synthetic amino acids, and combinations thereof. The term “peptide” is generally used to refer to a polypeptide having a length of less than about 100 amino acids, less than about 50 amino acids, less than 20 amino acids, or less than 10 amino acids. In some embodiments, a protein is antibodies, antibody fragments, biologically active portions thereof, and/or characteristic portions thereof.

[0080] Polynucleotide: As used herein, the term “polynucleotide” refers to any polymeric chain of nucleic acids. In some embodiments, a polynucleotide is or comprises RNA; in some embodiments, a polynucleotide is or comprises DNA. In some embodiments, a polynucleotide is, comprises, or consists of one or more natural nucleic acid residues. In some embodiments, a polynucleotide is, comprises, or consists of one or more nucleic acid analogs. In some embodiments, a polynucleotide analog differs from a nucleic acid in that it does not utilize a phosphodiester backbone. Alternatively or additionally, in some embodiments, a polynucleotide has one or more phosphorothioate and/or 5′-N-phosphoramidite linkages rather than phosphodiester bonds. In some embodiments, a polynucleotide is, comprises, or consists of one or more natural nucleosides (e.g., adenosine, thymidine, guanosine, cytidine, uridine, deoxyadenosine, deoxythymidine, deoxy guanosine, and deoxycytidine). In some embodiments, a polynucleotide is, comprises, or consists of one or more nucleoside analogs (e.g., 2-aminoadenosine, 2-thiothymidine, inosine, pyrrolo-pyrimidine, 3-methyl adenosine, 5-methylcytidine, C-5 propynyl-cytidine, C-5 propynyl-uridine, 2-aminoadenosine, C5-bromouridine, C5-fluorouridine, C5-iodouridine, C5-propynyl-uridine, C5-propynyl-cytidine, C5-methylcytidine, 2-aminoadenosine, 7-deazaadenosine, 7-deazaguanosine, 8-oxoadenosine, 8-oxoguanosine, 0(6)-methylguanine, 2-thiocytidine, methylated bases, intercalated bases, and combinations thereof). In some embodiments, a polynucleotide comprises one or more modified sugars (e.g., 2′-fluororibose, ribose, 2′-deoxyribose, arabinose, and hexose) as compared with those in natural nucleic acids. In some embodiments, a polynucleotide has a nucleotide sequence that encodes a functional gene product such as an RNA or protein. In some embodiments, a polynucleotide includes one or more introns. In some embodiments, a polynucleotide is prepared by one or more of isolation from a natural source, enzymatic synthesis by polymerization based on a complementary template (in vivo or in vitro), reproduction in a recombinant cell or system, and chemical synthesis. In some embodiments, a polynucleotide is at least 3, 4, 5, 6, 7, 8, 9, 10, 15, 20, 25, 30, 35, 40, 45, 50, 55, 60, 65, 70, 75, 80, 85, 90, 95, 100, 110, 120, 130, 140, 150, 160, 170, 180, 190, 20, 225, 250, 275, 300, 325, 350, 375, 400, 425, 450, 475, 500, 600, 700, 800, 900, 1000, 1500, 2000, 2500, 3000, 3500, 4000, 4500, 5000 or more residues long. In some embodiments, a polynucleotide is partly or wholly single stranded; in some embodiments, a polynucleotide is partly or wholly double stranded. In some embodiments, a polynucleotide has a nucleotide sequence comprising at least one element that encodes, or is the complement of a sequence that encodes, a polypeptide. In some embodiments, a polynucleotide has enzymatic activity.

[0081] Protein: As used herein, the term “protein” refers to a polypeptide (i.e., a string of at least two amino acids linked to one another by peptide bonds). Proteins may include moieties other than amino acids (e.g., may be glycoproteins, proteoglycans, etc.) and/or may be otherwise processed or modified. Those of ordinary skill in the art will appreciate that a “protein” can be a complete polypeptide chain as produced by a cell (with or without a signal sequence), or can be a characteristic portion thereof. Those of ordinary skill will appreciate that a protein can sometimes include more than one polypeptide chain, for example linked by one or more disulfide bonds or associated by other means.

[0082] Recombinant: As used herein, the term “recombinant” is intended to refer to polypeptides that are designed, engineered, prepared, expressed, created, manufactured, and/or or isolated by recombinant means, such as polypeptides expressed using a recombinant expression construct transfected into a host cell; polypeptides isolated from a recombinant, combinatorial human polypeptide library; polypeptides isolated from an animal (e.g., a mouse, rabbit, sheep, fish, etc.) that is transgenic for or otherwise has been manipulated to express a gene or genes, or gene components that encode and/or direct expression of the polypeptide or one or more component(s), portion(s), element(s), or domain(s) thereof, and/or polypeptides prepared, expressed, created or isolated by any other means that involves splicing or ligating selected nucleic acid sequence elements to one another, chemically synthesizing selected sequence elements, and/or otherwise generating a nucleic acid that encodes and/or directs expression of a polypeptide or one or more component(s), portion(s), element(s), or domain(s) thereof. In some embodiments, one or more of such selected sequence elements is found in nature. In some embodiments, one or more of such selected sequence elements is designed in silico. In some embodiments, one or more such selected sequence elements results from mutagenesis (e.g., in vivo or in vitro) of a known sequence element, e.g., from a natural or synthetic source such as, for example, in the germline of a source organism of interest (e.g., of a human, a mouse, etc.).

[0083] Reference: As used herein, the term “reference” describes a standard or control relative to which a comparison is performed. For example, in some embodiments, an agent, animal, individual, population, sample, sequence or value of interest is compared with a reference or control agent, animal, individual, population, sample, sequence or value. In some embodiments, a reference or control is tested and/or determined substantially simultaneously with the testing or determination of interest. In some embodiments, a reference or control is a historical reference or control, optionally embodied in a tangible medium. Typically, as would be understood by those skilled in the art, a reference or control is determined or characterized under comparable conditions or circumstances to those under assessment. Those skilled in the art will appreciate when sufficient similarities are present to justify reliance on and/or comparison to a particular possible reference or control. In some embodiments, a reference is a negative control reference; in some embodiments, a reference is a positive control reference.

[0084] Regulatory Element: As used herein, the term “regulatory element” or “regulatory sequence” refers to non-coding regions of DNA that regulate, in some way, expression of one or more particular genes. In some embodiments, such genes are apposed or “in the neighborhood” of a given regulatory element. In some embodiments, such genes are located quite far from a given regulatory element. In some embodiments, a regulatory element impairs or enhances transcription of one or more genes. In some embodiments, a regulatory element may be located in cis to a gene being regulated. In some embodiments, a regulatory element may be located in trans to a gene being regulated. For example, in some embodiments, a regulatory sequence refers to a nucleic acid sequence which is regulates expression of a gene product operably linked to a regulatory sequence. In some such embodiments, this sequence may be an enhancer sequence and other regulatory elements which regulate expression of a gene product.

[0085] Sample: As used herein, the term “sample” typically refers to an aliquot of material obtained or derived from a source of interest. In some embodiments, a source of interest is a biological or environmental source. In some embodiments, a source of interest may be or comprise a cell or an organism, such as a microbe (e.g., virus), a plant, or an animal (e.g., a human). In some embodiments, a source of interest is or comprises biological tissue or fluid. In some embodiments, a biological tissue or fluid may be or comprise amniotic fluid, aqueous humor, ascites, bile, bone marrow, blood, breast milk, cerebrospinal fluid, cerumen, chyle, chime, ejaculate, endolymph, exudate, feces, gastric acid, gastric juice, lymph, mucus, pericardial fluid, perilymph, peritoneal fluid, pleural fluid, pus, rheum, saliva, sebum, semen, serum, smegma, sputum, synovial fluid, sweat, tears, urine, vaginal secretions, vitreous humour, vomit, and/or combinations or component(s) thereof. In some embodiments, a biological fluid may be or comprise an intracellular fluid, an extracellular fluid, an intravascular fluid (blood plasma), an interstitial fluid, a lymphatic fluid, and/or a transcellular fluid. In some embodiments, a biological fluid may be or comprise a plant exudate. In some embodiments, a biological tissue or sample may be obtained, for example, by aspirate, biopsy (e.g., fine needle or tissue biopsy), swab (e.g., oral, nasal, skin, or vaginal swab), scraping, surgery, washing or lavage (e.g., bronchioalveolar, ductal, nasal, ocular, oral, uterine, vaginal, or other washing or lavage). In some embodiments, a biological sample is or comprises cells obtained from an individual. In some embodiments, a sample is a “primary sample” obtained directly from a source of interest by any appropriate means. In some embodiments, as will be clear from context, the term “sample” refers to a preparation that is obtained by processing (e.g., by removing one or more components of and/or by adding one or more agents to) a primary sample. For example, filtering using a semi-permeable membrane. Such a “processed sample” may comprise, for example nucleic acids or proteins extracted from a sample or obtained by subjecting a primary sample to one or more techniques such as amplification or reverse transcription of nucleic acid, isolation and/or purification of certain components, etc.

[0086] Subject: As used herein, the term “subject” refers an organism, typically a mammal (e.g., a human, in some embodiments including prenatal human forms). In some embodiments, a subject is suffering from a relevant disease, disorder or condition. In some embodiments, a subject is susceptible to a disease, disorder, or condition. In some embodiments, a subject displays one or more symptoms or characteristics of a disease, disorder or condition. In some embodiments, a subject does not display any symptom or characteristic of a disease, disorder, or condition. In some embodiments, a subject is someone with one or more features characteristic of susceptibility to or risk of a disease, disorder, or condition. In some embodiments, a subject is a patient. In some embodiments, a subject is an individual to whom diagnosis and/or therapy is and/or has been administered.

[0087] Substantially: As used herein, the term “substantially” refers to a qualitative condition of exhibiting total or near-total extent or degree of a characteristic or property of interest. One of ordinary skill in the art will understand that biological and chemical phenomena rarely, if ever, go to completion and/or proceed to completeness or achieve or avoid an absolute result. The term “substantially” is therefore used herein to capture a potential lack of completeness inherent in many biological and chemical phenomena.

[0088] Target site: As used herein, the term “target site” means a portion of a nucleic acid to which a binding molecule, e.g., a microRNA, an siRNA, a guide RNA (“gRNA”) or a guide RNA:Cas complex, will bind, provided sufficient conditions for binding exist. In some embodiments, a nucleic acid comprising a target site is double stranded. In some embodiments, a nucleic acid comprising a target site is single stranded. Typically, a target site comprises a nucleic acid sequence to which a binding molecule, e.g., a gRNA or a gRNA:Cas complex described herein, binds and/or that is cleaved as a result of such binding. In some embodiments, a target site comprises a nucleic acid sequence (also referred to herein as a target sequence or protospacer) that is complementary to a DNA sequence to which the targeting sequence (also referred to herein as the spacer) of a gRNA described herein binds. In some embodiments in the context of RNA-guided nucleases, e.g., CRISPR/Cas nucleases, a target site typically comprises a nucleotide sequence (also referred to herein as a target sequence or a protospacer) that is complementary to a sequence comprised in a gRNA (also referred to herein as the targeting sequence or the spacer) of an RNA-programmable nuclease. In some such embodiments, a target site further comprises a protospacer adjacent motif (PAM) at the 3′ end or 5′ end adjacent to the gRNA-complementary sequence. For an RNA-guided nuclease Cas9, a target sequence may be, in some embodiments, 16-24 base pairs plus a 3-6 base pair PAM (e.g., NNN, wherein N represents any nucleotide). Exemplary PAM sequences for RNA-guided nucleases, such as Cas9, are known to those of skill in the art and include, without limitation, NNG, NGN, NAG, NGA, NGG, NGAG and NGCG wherein N represents any nucleotide. In addition, Cas9 nucleases from different species have been described, e.g., S. thermophilus recognizes a PAM that comprises the sequence NGGNG, and Cas9 from S. aureus recognizes a PAM that comprises the sequence NNGRRT. In some embodiments, Cas9 from S. aureus recognizes a PAM that comprises the sequence NNNRRT. Additional PAM sequences are known in the art, including, but not limited to NNAGAAW and NAAR (see, e.g., Esvelt and Wang, Molecular Systems Biology, 9:641 (2013), the entire content of which is incorporated herein by reference). For example, the target site of an RNA-guided nuclease, such as, e.g., Cas9, may comprise a structure [Nz]-[PAM], where each N is, independently, any nucleotide, and z is an integer between 1 and 50. In some embodiments, z is at least 2, at least 3, at least 4, at least 5, at least 6, at least 7, at least 8, at least 9, at least 10, at least 11, at least 12, at least 13, at least 14, at least 15, at least 16, at least 17, at least 18, at least 19, at least 20, at least 25, at least 30, at least 35, at least 40, at least 45, or at least 50. In some embodiments, z is 5, 6, 7, 8, 9, 10, 11, 12, 13, 14, 15, 16, 17, 18, 19, 20, 21, 22, 23, 24, 25, 26, 27, 28, 29, 30, 31, 32, 33, 34, 35, 36, 37, 38, 39, 40, 41, 42, 43, 44, 45, 46, 47, 48, 49, or 50. In some embodiments, Z is 20.

[0089] Treatment: As used herein, the term “treatment” (also “treat” or “treating”) refers to any administration of a therapy that partially or completely alleviates, ameliorates, eliminates, reverses, relieves, inhibits, delays onset of, reduces severity of, and/or reduces incidence of one or more symptoms, features, and/or causes of a particular disease, disorder, and/or condition. In some embodiments, such treatment may be of a subject who does not exhibit signs of the relevant disease, disorder and/or condition and/or of a subject who exhibits only early signs of the disease, disorder, and/or condition. Alternatively, or additionally, such treatment may be of a subject who exhibits one or more established signs of the relevant disease, disorder and/or condition. In some embodiments, treatment may be of a subject who has been diagnosed as suffering from the relevant disease, disorder, and/or condition. In some embodiments, treatment may be of a subject known to have one or more susceptibility factors that are statistically correlated with increased risk of development of a given disease, disorder, and/or condition.

[0090] Variant: As used herein, the term “variant” refers to a version of something, e.g., a gene sequence, that is different, in some way, from another version. To determine if something is a variant, a reference version is typically chosen and a variant is different relative to that reference version. In some embodiments, a variant can have the same or a different (e.g., increased or decreased) level of activity or functionality than a wild type sequence. For example, in some embodiments, a variant can have improved functionality as compared to a wild-type sequence if it is, e.g., codon-optimized to resist degradation, e.g., by an inhibitory nucleic acid, e.g., miRNA. Such a variant is referred to herein as a gain-of-function variant. In some embodiments, a variant has a reduction or elimination in activity or functionality or a change in activity that results in a negative outcome (e.g., increased electrical activity resulting in chronic depolarization that leads to cell death). Such a variant is referred to herein as a loss-of-function variant. For example, in some embodiments, a KCNQ4 gene sequence is a wild-type sequence, which encodes a functional protein and exists in a majority of members of species with genomes containing the KCNQ4 gene. In some such embodiments, a gain-of-function variant can be a gene sequence of KCNQ4 that contains one or more nucleotide differences relative to a wild-type KCNQ4 gene sequence. In some embodiments, a wild-type sequence is not an endogenous sequence. In some embodiments, a gain-of-function variant is a codon-optimized sequence which encodes a transcript or polypeptide that may have improved properties (e.g., less susceptibility to degradation, e.g., less susceptibility to miRNA mediated degradation) than its corresponding wild type (e.g., non-codon optimized) version. In some embodiments, a loss-of-function variant has one or more changes that result in a transcript or polypeptide that is defective in some way (e.g., decreased function, non-functioning) relative to the wild type transcript and/or polypeptide. For example, in some embodiments, a mutation in a KCNQ4 sequence results in a non-functional or otherwise defective KCNQ4 protein, which impairs or prevents function of a KCNQ4-containing potassium channel in ear outer hair cells. In some such embodiments, such loss-of-function variant KCNQ4-containing channels result in chronic depolarization of outer hair cells and, consequently, cell death.

### BRIEF DESCRIPTION OF THE DRAWING

[0091] FIG. 1 shows overall schematic of exons in a KCNQ4 gene and lists certain exemplary mutations known to result in hearing loss.

[0092] FIG. 2 shows an exemplary inhibitory RNA knockdown strategy using at least one construct, in accordance with an embodiment of the present disclosure.

[0093] FIG. 3 shows levels of expression of KCNQ4 in HEK293 cells with or without treatment with exemplary shRNA-mediated knockdown.

[0094] FIG. 4 shows exemplary shRNA and miRNA constructs for KCNQ4 knockdown.

[0095] FIG. 5 shows exemplary designs of eight miRNA targeting constructs for inhibiting KCNQ4 expression.

[0096] FIG. 6 depicts a schematic that displays exemplary miRNA constructs for choosing miRNAs targeting sequences expressed within a variety of compartments within the ear.

[0097] FIG. 7 shows a schematic of exemplary miR constructs and reporter system for KCNQ4 knockdown, in accordance with an embodiment of the present disclosure. In this reporter system, if an miRNA binds to KCNQ4-mScarlet mRNA, cleavage of the mRNA occurs and no detectable signal (mScarlet) is produced by the reporter, demonstrating effective KCNQ4 knockdown. By contrast, if an miRNA does not bind to KCNQ4-mScarlet mRNA, no cleavage occurs and a detectable signal (mScarlet) produced, demonstrating KCNQ4 expression (i.e., no knockdown).

[0098] FIG. 8 shows an exemplary miR mediated knockdown (miR1-155), using a luciferase reporter assay in accordance with an embodiment of the present disclosure. FIG. 8 discloses SEQ ID NOS 292-296, respectively, in order of appearance.

[0099] FIG. 9 shows an exemplary CRISPR-based construct and reporter system for KCNQ4 knockdown, in accordance with an embodiment of the present disclosure.

[0100] FIG. 10 shows levels of expression of KCNQ4 in BEK cells after CRISPR-mediated knockdown (N=3 biological replicates).

[0101] FIG. 11 shows results from an exemplary assay measuring levels of mRNA expression of KCNQ4 in BEK cells after shRNA-mediated knockdown (N=3 biological replicates per condition).

[0102] FIG. 12 shows results from an exemplary assay measuring levels of mRNA expression of KCNQ4 in BEK cells after shRNA-mediated knockdown (N=3 biological replicates per condition).

[0103] FIG. 13 shows an exemplary miR-based construct, reporter system and assay for KCNQ4 knockdown, in accordance with an embodiment of the present disclosure.

[0104] FIGS. 14A-14B show results obtained when exemplary scaffolds and targeting sequences were evaluated and level of KCNQ4 was assessed after evaluation.

[0105] FIG. 15 shows results obtained when exemplary scaffolds and targeting sequences were used and KCNQ4 levels were assessed.

[0106] FIG. 16 shows results obtained when exemplary scaffolds and targeting sequences were evaluated using an exemplary off-target reporter assay.

[0107] FIG. 17 shows results obtained when exemplary scaffolds and targeting sequences were evaluated using an exemplary passenger reporter assay.

[0108] FIG. 18 shows results obtained when exemplary scaffolds and targeting sequences were used and KCNQ4 levels were assessed.

[0109] FIG. 19 shows results obtained when exemplary scaffolds and targeting sequences were used and KCNQ4 levels were assessed.

[0110] FIG. 20 shows results obtained when exemplary scaffolds and targeting sequences were used and KCNQ4 levels were assessed.

[0111] FIG. 21 shows in vitro knockdown of KCNQ4 by exemplary scaffolds and targeting sequences described herein.

[0112] FIG. 22 shows an image depicting a western blot to assess in vitro knockdown of KCNQ4 using exemplary scaffolds and targeting sequences described herein.

[0113] FIG. 23 shows in vitro knockdown of KCNQ4 by exemplary scaffolds and targeting sequences described herein.

[0114] FIG. 24 shows an image depicting a western blot to assess in vitro knockdown of KCNQ4 using exemplary scaffolds and targeting sequences described herein.

[0115] FIG. 25 shows results obtained when exemplary scaffolds and targeting sequences were evaluated and level of KCNQ4 was assessed after evaluation.

[0116] FIG. 26 shows images of BEK cells transduced with an exemplary AAVAnc80-CAG.EGFP construct at three MOIs.

[0117] FIG. 27 shows results obtained when exemplary scaffolds and targeting sequences were used and KCNQ4 channel conductance levels were assessed.

[0118] FIG. 28 shows an image depicting a western blot to assess in vitro knockdown of KCNQ4 using exemplary scaffolds and targeting sequences described herein.

[0119] FIGS. 29A-29B is a schematic representation of an administration method as described herein. FIG. 29A includes an image of a delivery device as described herein. A delivery device as shown is intended for intracochlear administration of injected fluid through the round window membrane, with a stopper (green) to guide insertion depth. FIG. 29B includes an images showing an expected flow of injected fluid through scala tympani to scala vestibuli (via communication at the helicotrema at the cochlear apex) and then out of the cochlea through a vent placed in the stapes footplate of a delivery device within the oval window (Talei 2019, which is incorporated herein in its entirety by reference).

[0120] FIG. 30 depicts seven miRNA targeting constructs for inhibiting KCNQ4 expression that can be used in accordance with the present disclosure.

[0121] FIG. 31 depicts off-targets of seven miRNA targeting constructs for inhibiting KCNQ4 expression that can be used in accordance with the present disclosure.

[0122] FIG. 32 illustrates a perspective of a device for delivering fluid to an inner ear, according to aspects of the present disclosure.

[0123] FIG. 33 illustrates a sideview of a bent needle sub-assembly, according to aspects of the present disclosure.

[0124] FIG. 34 illustrates a perspective view of a device for delivering fluid to an inner ear, according to aspects of the present disclosure.

[0125] FIG. 35 illustrates a perspective view of a bent needle sub-assembly coupled to the distal end of a device, according to aspects of the present disclosure.

[0126] FIGS. 36A-36C include data showing KCNQ4 expression measured from an exemplary AAV vector as described herein following administration to mice. FIG. 36A includes a table providing certain details about the experiment performed in Example 10 below. FIG. 36B includes a bar graph showing the relative level of mouse KCNQ4 (mKCNQ4) expression in the mouse cochlea as detected by qPCR. FIG. 36C includes a bar graph showing the relative level of human KCNQ4 (hKCNQ4) expression in the mouse cochlea as detected by qPCR.

[0127] FIG. 37 includes data showing that AAVAnc80 mediated knockdown of mouse KCNQ4 (via miR) and gene transfer of human KCNQ4 preserved outer hair cell survival and/or function. FIG. 37A includes a bar graph showing that, as the dose of the administered construct was increased, the DPOAE thresholds decreased, indicating an improvement in outer hair cell function. FIG. 37B includes an image demonstrating that an increasing dose of construct resulted in increased survival of outer hair cells at P45, as visualized by whole-mount histology.

[0128] FIGS. 38A-38B include data showing AAVAnc80(CRISPR)-mediated knockdown with hKCNQ4 gene transfer preserved outer hair cell survival and/or function. FIG. 38A includes bar graphs showing that, as the dose of the construct was increased, the DPOAE thresholds decreased as measured at various kHz, indicating an improvement in outer hair cell function. The bar graphs of FIG. 38A also include data showing that the treatment was able to partially rescue outer hair cell function. FIG. 38B shows a table depicting the number of animals for each Treatment Group (6 per group) at a 30-day survival duration.

[0129] FIG. 39 shows an image depicting a western blot to assess in vitro knockdown of KCNQ4 using exemplary scaffolds and targeting sequences described herein.

[0130] FIG. 40 shows a graph depicting distortion product otoacoustic emissions (DPOAE) thresholds (dB SPL) measured at 8 kHz (left) and 16 kHz (right) for four treatment groups.

[0131] FIG. 41 shows a graph depicting percent (%) survival of outer hair cells measured at 8 kHz (left) and 16 kHz (right) for four treatment groups.

### DETAILED DESCRIPTION OF CERTAIN EMBODIMENTS

### 1. Hearing Loss

[0132] Generally, an ear can be described as including: an outer ear, middle ear, inner ear, hearing (acoustic) nerve, and auditory system (which processes sound as it travels from the ear to the brain). In addition to detecting sound, ears also help to maintain balance. Thus, in some embodiments, inner ear disorders can cause hearing loss, tinnitus, vertigo, imbalance, or combinations thereof.

[0133] Hearing loss can be a result of genetic factors, environmental factors, or a combination of genetic and environmental factors. About half of all people who have tinnitus—phantom noises in their auditory system (ringing, buzzing, chirping, humming, or beating)—also have an over-sensitivity to/reduced tolerance for certain sound frequency and volume ranges, known as hyperacusis (also spelled hyperacousis). A variety of nonsyndromic and syndromic-related hearing losses will be known to those of skill in the art (e.g., DFNB4, and Pendred syndrome, respectively). Environmental causes of hearing impairment or loss may include, e.g., certain medications, specific infections before or after birth, and/or exposure to loud noise over an extended period. In some embodiments, hearing loss can result from noise, ototoxic agents, presbyacusis, disease, infection or cancers that affect specific parts of an ear. In some embodiments, ischemic damage can cause hearing loss via pathophysiological mechanisms. In some embodiments, intrinsic abnormalities, like congenital mutations to genes that play an important role in cochlear anatomy or physiology, or genetic or anatomical changes in supporting and/or hair cells can be responsible for or contribute to hearing loss.

[0134] Hearing loss and/or deafness is one of the most common human sensory deficits, and can occur for many reasons. In some embodiments, a subject may be born with hearing loss or without hearing, while others may lose hearing slowly over time. Approximately 36 million American adults report some degree of hearing loss, and one in three people older than 60 and half of those older than 85 experience hearing loss. Approximately 1.5 in 1,000 children are born with profound hearing loss, and another two to three per 1,000 children are born with partial hearing loss (Smith et al., 2005, Lancet 365:879-890, which is incorporated in its entirety herein by reference). More than half of these cases are attributed to a genetic basis (Di Domenico, et al., 2011, J. Cell. Physiol. 226:2494-2499, which is incorporated in its entirety herein by reference).

[0135] Treatments for hearing loss currently consist of hearing amplification for mild to severe losses and cochlear implantation for severe to profound losses (Kral and O'Donoghue, 2010, N. Engl. J. Med. 363:1438-1450, which is incorporated in its entirety herein by reference). Recent research in this arena has focused on cochlear hair cell regeneration, applicable to the most common forms of hearing loss, including presbycusis, noise damage, infection, and ototoxicity. There remains a need for effective treatments, such as gene therapy, which can repair and/or mitigate a source of a hearing problem.

[0136] In some embodiments, nonsyndromic hearing loss and/or deafness is not associated with other signs and symptoms. In some embodiments, syndromic hearing loss and/or deafness occurs in conjunction with abnormalities in other body parts. Approximately 70 percent to 80 percent of genetic hearing loss and/or deafness cases are nonsyndromic; remaining cases are often caused by specific genetic syndromes. Nonsyndromic deafness and/or hearing loss can have different patterns of inheritance, and can occur at any age. Types of nonsyndromic deafness and/or hearing loss are generally named according to their inheritance patterns. For example, autosomal dominant forms are designated DFNA, autosomal recessive forms are DFNB, and X-linked forms are DFN. Each type is also numbered in the order in which it was first described. For example, DFNA1 was the first described autosomal dominant type of nonsyndromic deafness.

[0137] Between 75 percent and 80 percent of genetically causative hearing loss and/or deafness cases are inherited in an autosomal recessive pattern, which means both copies of a gene in each cell have mutations. Usually, each parent of an individual with autosomal recessive hearing loss and/or deafness is a carrier of one copy of the mutated gene, but is not affected by this form of hearing loss. Another 20 percent to 25 percent of nonsyndromic hearing loss and/or deafness cases are autosomal dominant, which means one copy of the altered gene in each cell is sufficient to result in deafness and/or hearing loss. People with autosomal dominant deafness and/or hearing loss most often inherit an altered copy of the gene from a parent who is deaf and/or has hearing loss. Between one to two percent of cases of deafness and/or hearing loss show an X-linked pattern of inheritance, which means a mutated gene responsible for a condition is located on an X chromosome (one of the two sex chromosomes). Males with X-linked nonsyndromic hearing loss and/or deafness tend to develop more severe hearing loss earlier in life than females who inherit a copy of the same gene mutation. A characteristic of X-linked inheritance is that fathers cannot pass X-linked traits to their sons.

[0138] Mitochondrial nonsyndromic deafness, which results from changes to mitochondrial DNA, occurs in less than one percent of cases in the United States. Altered mitochondrial DNA is passed from a mother to all of her sons and daughters. This type of deafness is not inherited from fathers. The causes of syndromic and nonsyndromic deafness and/or hearing loss are complex. Researchers have identified more than 30 genes that, when altered, are associated with syndromic and/or nonsyndromic deafness and/or hearing loss; however, some of these genes have not been fully characterized. Different mutations in a given gene can be associated with different types of deafness and/or hearing loss, and some genes are associated with both syndromic and nonsyndromic deafness and/or hearing loss.

[0139] In some embodiments, deafness and/or hearing loss can be conductive (arising from the ear canal or middle ear), sensorineural (arising from the inner ear or auditory nerve), or mixed. In some embodiments, nonsyndromic deafness and/or hearing loss is associated with permanent hearing loss caused by damage to inner ear structures (sensorineural deafness). In some embodiments, sensorineural hearing loss can be due to poor hair cell function. In some embodiments, sensorineural hearing impairments involve the eighth cranial nerve (the vestibulocochlear nerve) or auditory brain regions. In some such embodiments, only auditory centers of a brain are affected. In such a situation, cortical deafness may occur, where sounds may be heard at normal thresholds, but quality of sound perceived is so poor that speech cannot be understood.

[0140] Hearing loss that results from middle ear changes is called conductive hearing loss. Some forms of nonsyndromic deafness and/or hearing loss involve changes in both inner and middle ear regions, called mixed hearing loss. Hearing loss and/or deafness that is present before a child learns to speak can be classified as prelingual or congenital. Hearing loss and/or deafness that occurs after development of speech can be classified as postlingual. Most autosomal recessive loci related to syndromic or nonsyndromic hearing loss cause prelingual severe-to-profound hearing loss.

[0141] As is known to those of skill in the art, hair cells are sensory receptors for both auditory and vestibular systems of vertebrate ears. Hair cells detect movement in their environments and, in mammals, hair cells are located within the cochlea of the ear, in the organ of Corti. Mammalian ears are known to have two types of hair cells—inner hair cells and outer hair cells. In some embodiments, outer hair cells amplify low level sound frequencies, either through mechanical movement of hair cell bundles or electrically-driven movement of hair cell soma. In some embodiments, inner hair cells transform vibrations in cochlear fluid into electrical signals that the auditory nerve transmits to the brain. In some embodiments, hair cells may be abnormal at birth, or damaged during the lifetime of an individual. In some embodiments, outer hair cells may be able to regenerate. In some embodiments, inner hair cells are not capable of regeneration after illness or injury. In some embodiments, sensorineural hearing loss is due to abnormalities in hair cells.

[0142] As is known to those of skill in the art, hair cells do not occur in isolation, and their function is supported by a wide variety of cells which can collectively be referred to as supporting cells. Supporting cells may fulfill numerous functions, and include a number of cell types, including but not limited to Hensen's cells, Deiters' cells, pillar cells, Claudius cells, inner phalangeal cells, and border cells. In some embodiments, sensorineural hearing loss is due to abnormalities in supporting cells. In some embodiments, supporting cells may be abnormal at birth, or damaged during the lifetime of an individual. In some embodiments, supporting cells may be able to regenerate. In some embodiments, certain supporting cells may not be capable of regeneration.

### 2. KCNQ4 and Hearing Loss

[0143] Typically, a human KCNQ4 gene has 4324 nucleic acid bases and encodes a 695 amino acid protein, with a predicted mass of approximately 77 kDa. A human KCNQ4 gene has 14 exons and located on chromosome 1. A KCNQ4 gene encodes a Kv7.4, a voltage-gated potassium channel subunit that forms a homotetrameric potassium channel. In other words, four KCNQ4 protein subunits form a single, voltage-gated potassium channel (Naito et al., 2013, which is incorporated herein by reference in its entirety). In some embodiments, a KCNQ4 protein (Kv7.4) may be part of a heteromeric channel, i.e., a heterotetrameric potassium channel comprising Kv7.4 and other KCNQ proteins, e.g., KCNQ3.

[0144] In some embodiments, one or more mutations in a KCNQ4 gene product may be associated with hearing loss. In some embodiments, distortion product optoacoustic emissions (DPOAEs) are absent in individuals affected by KCNQ4-mediated hearing loss.

[0145] Voltage-gated potassium channel subunit Kv7.4 is a protein encoded by a KCNQ4 gene and is normally most highly expressed in outer hair cells of the ear. As is known to those of skill in the art, OHCs are non-regenerative cells. Kv7.4 channels help maintain resting potential in ear hair cells. For example, Kv7.4 is expressed in bases of hair cells that help maintain hair cell resting potential (Kharkovets et al., 2006, which is incorporated in its entirety herein by reference) and in some embodiments, is expressed at approximately 8-fold higher in OHCs than IHCs.

[0146] Without being bound by any particular theory, the present disclosure contemplates that, either in addition or as an alternative to gene therapy that treats OHCs, gene therapy may be used to treat IHCs. KCNQ4 is typically expressed at low levels in IHCs (e.g., relative to OHCs) and, in some embodiments, gene therapy that impacts expression of KCNQ4 in IHCs may improve function of K+ channels. In some such embodiments, when gene therapy is used to treat IHCs instead of or in addition to OHCs in a subject in need thereof, channel conduction and/or hearing may improve.

[0147] In some embodiments, defects or changes in ion channels are associated with deafness. For example, in some embodiments, a change in a gene product of an ion channel, e.g., a Kv7.4 channel, may impact its function. In some embodiments, for example, one or more mutations in a KCNQ4 gene product can result in a non-functional or less functional ion channels as compared to ion channels comprises of subunits encoded by genes without one or more mutations. In some such embodiments, where one or more variations exists in KCNQ4 (e.g., relative to a wild-type sequence), for example, a resultant loss-of-function Kv7.4 protein variant can result in a non-functional or less functional channel. For example, in some embodiments, a loss-of-function Kv7.4 variant is or is part of an ion channel that antagonizes potassium currents. In some such embodiments, OHCs are chronically depolarized and eventually die (Jung et al., 2018, which is incorporated in its entirety herein by reference). In some embodiments, changes in one or more gene products of KCNQ4 is/are associated with hearing loss.

[0148] In some embodiments, KCNQ4-mediated hearing loss is DFNA2. DFNA2 is nonsyndromic hearing loss inherited as an autosomal dominant mutation in a genomic sequence of KCNQ4 (which, in turn, impacts function of Kv7.4 in hair cells). DFNA2 nonsyndromic hearing loss, in some embodiments, manifests as sensorineural post-lingual hearing impairment that is progressive and symmetric; generally, no vestibular impairment is present. In some such embodiments, hearing loss is symmetric, predominantly high-frequency sensorineural hearing loss (SNHL). In some such embodiments, hearing loss is progressive or eventually progresses across all frequencies.

[0149] Without wishing to be bound by any particular theory, in KCNQ4-related hearing loss, at younger ages, hearing loss tends to be mild for low frequency sounds and moderate for high frequency sounds. At older ages, hearing loss tends to moderate for low frequency sounds and severe to profound for high frequency sounds. Hearing loss tends to be present at high frequency sounds at all ages, likely present from birth. In some embodiments, patients with a KCNQ4 mutation experience hearing loss that requires a hearing aid between approximately ten to forty years of age, and experience severe-to-profound loss across all hearing frequencies by approximately seventy years of age (see, e.g., Table 1 for an exemplary set of range characterizations of hearing threshold vs severity of hearing loss).

TABLE 1
Exemplary Hearing Thresholds Associated
with Severity of Hearing Loss

| Severity | Threshold (dB) | |
|---|---|---|
| Mild | 26-40 | dB |
| Moderate | 41-55 | dB |
| Moderately-severe | 56-70 | dB |
| Severe | 71-90 | dB |
| Profound | 90 | dB |

[0150] Without being bound by any particular theory, the present disclosure contemplates technologies including gene therapy may be beneficial in one or more instances of a loss-of-function KCNQ4 variant. For example, in some embodiments, gene therapy includes administering a gain-of-function KCNQ4 variant (e.g., wild type, e.g., gain-of-function KCNQ4) that restores function, e.g., Kv7.4 channel function. In some embodiments, a gain-of-function KCNQ4 gene product (e.g., a wild type gene product, e.g., a codon-optimized gene product) is administered to a subject in need thereof.

[0151] In some embodiments, gene therapy includes suppressing one or more gene products associated with a loss-of-function KCNQ4 variant. In some such embodiments, suppression of a loss-of-function KCNQ4 variant may help to restore or prevent hearing loss. For example, without being bound by any particular theory, it is contemplated that, in some embodiments, a loss-of-function KCNQ4 variant gene product encodes a loss-of-function Kv7.4 variant. In some such embodiments, it is contemplated that such a loss-of-function Kv7.4 variant needs to be suppressed. In some embodiments, suppression alleviates toxicity or damage caused by a buildup of loss-of-function Kv7.4 variant protein. In some embodiments, a loss-of-function KCNQ4 variant gene product (e.g., Kv7.4 variant protein) is suppressed using gene therapy.

[0152] In some embodiments, gene therapy is administered to suppress a loss-of-function KCNQ4 variant and/or to express a gain-of-function KCNQ4 gene product (e.g., a wild type gene product, e.g., a codon optimized gene product). In some such embodiments, suppression and/or replacement of one or more KCNQ4 gene products mitigates, attenuates, or restores hearing loss in a subject. For example, the present disclosure recognizes that, in some embodiments, suppression of a loss-of-function KCNQ4 gene product variant (e.g., mRNA, e.g., protein) is desirable. In some such embodiments, suppression of a loss-of-function KCNQ4 gene product variant may occur alone, concomitant with, or subsequent to expression of a gain-of-function KCNQ4 gene product (e.g., functional Kv7.4 protein, e.g., functional ion channels that do not result in chronic depolarization and cell damage or death).

[0153] In some embodiments, suppression and/or replacement is accomplished using a single construct, or more than one construct (e.g., one construct comprising components to achieve suppression of a loss-of-function KCNQ4 variant gene product and another construct comprising components to achieve expression of a gain-of-function KCNQ4 gene product).

### 3. Compositions

[0154] Among other things, the present disclosure provides compositions. In some embodiments, a composition comprises a construct as described herein. In some embodiments, a composition comprises one or more constructs as described herein. In some embodiments, a composition comprises a plurality of constructs as described herein. In some embodiments, when more than one construct is included in the composition, the constructs are different from one another.

[0155] In some embodiments, a composition comprises a polynucleotide encoding a KCNQ4 protein or characteristic portion thereof. In some embodiments, a composition comprises a polynucleotide encoding an inhibitory molecule, e.g., an miRNA, etc. In some embodiments, a composition comprises at least one polynucleotide encoding a KCNQ4 protein or characteristic portion thereof and at least one polynucleotide encoding an inhibitory molecule, e.g., an miRNA.

[0156] In some embodiments, a composition comprises an AAV particle as described herein. In some embodiments, a composition comprises one or more AAV particles as described herein. In some embodiments, a composition comprises a plurality of AAV particles. In come embodiments, when more than one type of AAV particle is included in a composition, the more than one type of AAV particles are each different types of particles.

[0157] In some embodiments, a composition comprises a cell.

[0158] In some embodiments, a composition is or comprises a pharmaceutical composition.

a. KCNQ4 Polynucleotides

[0159] Among other things, the present disclosure provides polynucleotides, e.g., polynucleotides comprising a KCNQ gene or characteristic portion thereof. In some embodiments, the present disclosure provides polynucleotides that are or comprise inhibitory molecules, e.g., inhibitory to target site of KCNQ4 genes or characteristics thereof, e.g., miRNA, etc. The present disclosure also provides methods utilizing such polynucleotides and/or inhibitory molecules, e.g., in a composition (e.g., a pharmaceutical composition).

[0160] In some embodiments, a polynucleotide of the present disclosure may be or comprise DNA or RNA. In some embodiments, DNA can be genomic DNA or cDNA. In some embodiments, RNA can be an mRNA, an miRNA, an shRNA/siRNA, a gRNA, etc.

[0161] In some embodiments, a polynucleotide comprises exons and/or introns of a KCNQ4 gene.

[0162] In some embodiments, a gene product is expressed from a polynucleotide comprising a KCNQ4 gene or characteristic portion thereof. In some embodiments, expression of such a polynucleotide can utilize one or more control elements (e.g., promoters, enhancers, splice sites, polyadenylation sites, translation initiation sites, etc.). Thus, in some embodiments, a polynucleotide provided herein can comprise one or more control elements.

[0163] In some embodiments, a KCNQ4 gene is a mammalian KCNQ4 gene. In some embodiments, a KCNQ4 gene is a murine KCNQ4 gene. An exemplary murine KCNQ4 cDNA sequence is or includes the sequence of SEQ ID NO: 91. In some embodiments, a KCNQ4 gene is a primate KCNQ4 gene. In some embodiments, a KCNQ4 gene is a human KCNQ4 gene. An exemplary human KCNQ4 cDNA sequence is or includes the sequence of SEQ ID NO: 2. An exemplary human KCNQ4 cDNA sequence is or includes the sequence of SEQ ID NO: 90. An exemplary human KCNQ4 genomic DNA sequence can be found in SEQ ID NO: 5. Exemplary human KCNQ4 cDNA sequences including untranslated regions is or includes the sequence of SEQ ID NOs: 6, 7, or 8. An exemplary human KCNQ4 RNA sequence can be found in, e.g., SEQ ID NO: 1. Exemplary human codon-optimized KCNQ4 sequences (e.g., optimized to resist gRNA binding and/or miRNA degradation) can be found in, e.g., SEQ ID NOs: 9 or 10.

[0164] For example, in some embodiments, the present disclosure describes exemplary constructs that have been codon-optimized (e.g., Exemplary pITR-CMV.hKCNQ4codop_v2.mScarlet, SEQ ID NO: 255) to resist microRNA. In some embodiments, the present disclosure recognizes that one challenge of exogenously providing a polynucleotide that encodes a functional (e.g., wild type, e.g., gain-of-function) KCNQ4 gene product is that it may, in some embodiments, be vulnerable to microRNA-mediated (e.g., exogenously provided and/or endogenous miRNAs) degradation. In some such embodiments, the present disclosure recognizes that codon optimization, which may change a polynucleotide sequence without materially altering the polypeptide sequence of a KCNQ4 gene product, may be more resistant to microRNA-mediated degradation as compared to a non-codon optimized (i.e., wild-type) KCNQ4 gene sequence. In some embodiments, a construct comprising a codon-optimized KCNQ4 polynucleotide can be used in conjunction with a construct comprising an miRNA. In some embodiments, such miRNA can be used to knock-down (or suppress) a loss-of-function KCNQ4 variant.

[0165] As another example, in some embodiments, the present disclosure describes exemplary constructs that can for delivery of a gRNA to be used in conjunction with a CRISPR/Cas9-mediated genome editing strategy as described herein. In some embodiments, such exemplary constructs comprise a gRNA that targets a SaCas9 enzyme to an appropriate genomic location. In some embodiments, such exemplary constructs comprise a gRNA that targets a SaCas9 enzyme to an appropriate genomic location in addition to a KCNQ4 construct that has been engineered to resist SaCas9-mediated gene silencing (e.g., Exemplary Construct pITR-CMV.hKCNQ4codop.U6-hsammu386Fw sequence (SEQ ID NO: 269) or Exemplary pITR-CMV.hKCNQ4codop.U6-hsa408Rev sequence (SEQ ID NOs: 270 or 273).

[0166] The present disclosure recognizes that one challenge of exogenously providing a polynucleotide that encodes a functional (e.g., wild type, e.g., gain-of-function) KCNQ4 gene product is that it may, in some embodiments, be vulnerable to microRNA-mediated degradation (exogenously provided and/or endogenous miRNAs) or gRNA interference (e.g., via gRNA binding). In some such embodiments, the present disclosure recognizes that codon optimization, which changes a polynucleotide sequence without materially altering its resultant polypeptide sequence, of, e.g., a KCNQ4 gene product, may be more resistant to microRNA-mediated degradation or to gRNA binding, as compared to a non-codon optimized (i.e., wild-type) KCNQ4 gene sequence. In some embodiments, a construct comprising a codon-optimized KCNQ4 polynucleotide can be used in conjunction with a construct comprising an miRNA, which miRNA can be used to knock-down (suppress) a loss-of-function KCNQ4 variant. Exemplary codon-optimized sequences that resist miRNA-mediated degradation or gRNA binding may be or comprise SEQ ID NO:s 9 or 10 or portions thereof, respectively.

[0167] Changes in a wild-type sequence of a KCNQ4 gene can be or comprise missense or nonsense mutations. In some such embodiments, a resultant Kv7.4 protein is a loss-of-function variant (e.g., a protein that antagonizes normal channel function). In some such embodiments, changes in a wild-type sequence of KCNQ4 can result in hearing loss or increase risk of hearing loss in progeny of a subject that has at least one change in one copy of a KCNQ4 gene.

[0168] KCNQ4-mediated hearing loss is transmitted in an autosomal dominant manner; that is, a mutation in one copy of KCNQ4 can result in hearing loss. Many allelic variants in KCNQ4 are known and at least thirty different loss-of-function KCNQ4 mutations have been identified, thus far, localized to various different genomic regions. In some embodiments, a change in a wild-type sequence is a change in an exonic sequence. For example, the three most frequent missense mutations described in the DVD (Deafness Variation Database) are F182L (exon 4), V672M and S680F (exon 14). In some embodiments, a change in a wild-type sequence is a change in an intronic sequence. For example, as is known to those of skill in the art, in some embodiments, an intronic (splice acceptor) mutation causes DFNA2 (c.1044-1051del) or A349PfsX19.

[0169] The present disclosure includes technologies that may, in some embodiments, targeting a KCNQ4 gene product, e.g., a KCNQ4 transcript, e.g., a KCNQ4 mRNA (SEQ ID NO:4). In some embodiments, an inhibitory nucleic acid molecule or genome editing system targets nucleotides of SEQ ID NOs: 1-10 and/or 25-30 and/or 90-91, or a portion thereof. In some embodiments, an inhibitory nucleic acid molecule or genome editing system comprises (i) a nucleotide sequence that is at least 85%, 90%, 91%, 92%, 93%, 94%, 95%, 96%, 97%, 98%, 99%, or 100% identical to any one of SEQ ID NOs:42-70 or SEQ ID NOs: 96-97 (or a portion thereof) and/or (ii) a nucleotide sequence that is complementary to a nucleotide sequence that is at least 90%, 91%, 92%, 93%, 94%, 95%, 96%, 97%, 98%, 99%, or 100% identical to any one of SEQ ID NOs:1-10 and/or 25-30 and/or 90-91 (or a portion thereof).

[0170] The amino acid and nucleotide sequences of human KCNQ4 are known in the art and can be found in publicly available databases, for example, the National Center for Biotechnology Information (NCBI) Reference Sequence (RefSeq) database, where they are listed under RefSeq accession numbers NP_004691 (current accession. version number NP_004691.2) and NM_004700 (current accession. version number NM_004700.4), respectively (where “amino acid sequence” refers to the sequence of the KCNQ4 polypeptide and “nucleotide sequence” in this context refers to the KCNQ4 mRNA sequence as represented in genomic DNA, it being understood that the actual mRNA nucleotide sequence contains U rather than T).

[0171] The human KCNQ4 gene has been assigned NCBI Gene ID: 9132, and the genomic KCNQ4 sequence has RefSeq accession number NG_008139 (current accession. version number NG_008139.3). The nucleotide sequence of human KCNQ4 mRNA is set forth as SEQ ID NO: 4.

[0172] In some embodiments, a KCNQ4 nucleic acid sequence is a codon optimized sequence. In some embodiments, the codon optimized sequence is approximately 70, 75, 80, 85, 90, 95, 96, 97, 98, 99, 99.5 or 99.9% similar to the wild-type KCNQ4 nucleic acid sequence or any known functional variant thereof, which variant is capable of generating a functional gene product.

[0173] The present disclosure recognizes that certain changes to a polynucleotide sequence will not impact its expression or a protein encoded by said polynucleotide. For example, in some embodiments, a polynucleotide comprises a KCNQ4 gene having one or more silent mutations. In some such embodiments, the disclosure provides a polynucleotide that comprises a KCNQ4 gene having one or more silent mutations, e.g., a KCNQ4 gene having a sequence different from SEQ ID NOs: 1-10 and/or 25-30 and/or 90-91, but encoding the same amino acid sequence as a wild-type or gain-of-function KCNQ4 gene.

[0174] In some embodiments, the disclosure provides a polynucleotide that comprises an KCNQ4 gene or gene product having a sequence different from any of SEQ ID NOs: 1-10 and/or 25-30 and/or 90-91 that encodes an amino acid sequence including one or more mutations (e.g., a different amino acid sequence when compared to that produced from a functional, e.g., wild type, e.g., gain-of-function (e.g., codon-optimized) KCNQ4 gene), where the one or more mutations are conservative amino acid substitutions.

[0175] One skilled in the art would appreciate that a change (e.g., substitution, addition, deletion, etc.) of amino acids that are not conserved between the same protein from different species is less likely to have an effect on the function of a protein and therefore, these amino acids should be selected for mutation. Amino acids that are conserved between the same protein from different species should not be changed (e.g., deleted, added, substituted, etc.), as these mutations are more likely to result in a change in function of a protein.

[0176] In some embodiments, the disclosure provides a polynucleotide that comprises a KCNQ4 gene having a sequence different from SEQ ID NOs: 1-10 and/or 25-30 and/or 90-91 that encodes an amino acid sequence including one or more mutations (e.g., a different amino acid sequence when compared to that produced from a functional (e.g., wild-type, e.g., gain-of-function, e.g., codon-optimized) KCNQ4 gene), where the one or more mutations are not within a characteristic portion of a KCNQ4 gene or encoded Kv7.4 protein.

[0177] In some embodiments, a polynucleotide in accordance with the present disclosure comprises a KCNQ4 gene or gene product that is at least 85%, at least 90%, at least 95%, at least 98%, or at least 99% identical to a sequence of SEQ ID NOs: 1-10 and/or 25-30 and/or 90-91.

[0178] In some embodiments, a polynucleotide in accordance with the present disclosure comprises KCNQ4 sequence that is identical to the sequence of SEQ ID NOs: 1-10 and/or 25-30 and/or 90-91. As will be understood to those of skill in the art, sequences disclosed herein can be optimized or further (e.g., codon optimized) to achieve increased or optimal expression in an animal, e.g., a mammal, e.g., a human. For example, in some embodiments, a polynucleotide of the present disclosure comprises a sequence encoding KCNQ4, which sequence is codon optimized to prevent, e.g., gRNA or miRNA binding, etc.

[0179] By way of non-limiting example, a KCNQ4 polynucleotide in accordance with the present disclosure may be or comprise one or more of the following sequences according to SEQ ID NOs. 1-10 or 90-91.

b. KCNQ4 Polypeptides

[0180] Among other things, the present disclosure provides polypeptides encoded by a KCNQ4 gene or gene product or characteristic portion thereof. In some embodiments, a KCNQ4 gene is a mammalian KCNQ4 gene. In some embodiments, a KCNQ4 gene is a murine KCNQ4 gene. In some embodiments, a KCNQ4 gene is a primate KCNQ4 gene. In some embodiments, a KCNQ4 gene is a human KCNQ4 gene.

[0181] In some embodiments, a polypeptide comprises a Kv7.4 protein or characteristic portion thereof. In some embodiments, a Kv7.4 protein or characteristic portion thereof is a mammalian Kv7.4 protein or characteristic portion thereof, e.g., primate Kv7.4 protein or characteristic portion thereof. In some embodiments, a Kv7.4 protein or characteristic portion thereof is a human Kv7.4 protein or characteristic portion thereof.

[0182] In some embodiments, a polypeptide provided herein comprises post-translational modifications. In some embodiments, a Kv7.4 protein or characteristic portion thereof provided herein comprises post-translational modifications. In some embodiments, post-translational modifications can comprise but is not limited to glycosylation (e.g., N-linked glycosylation, O-linked glycosylation), phosphorylation, acetylation, amidation, hydroxylation, methylation, ubiquitylation, sulfation, and/or a combination thereof.

[0183] By way of non-limiting example, a KCNQ4 polypeptide in accordance with the present disclosure may be or comprise one or more of the following sequences according to SEQ ID NOs. 11-13 or 92.

c. Constructs

[0184] Among other things, the present disclosure provides that some polynucleotides as described herein are polynucleotide constructs. Polynucleotide constructs according to the present disclosure include all those known in the art, including cosmids, plasmids (e.g., naked or contained in liposomes) and viral constructs (e.g., lentiviral, retroviral, adenoviral, and adeno-associated viral constructs) that incorporate a polynucleotide comprising a KCNQ4 gene or characteristic portion thereof. Those of skill in the art will be capable of selecting suitable constructs, as well as cells, for making any of the nucleic acids described herein. In some embodiments, a construct is a plasmid (i.e., a circular DNA molecule that can autonomously replicate inside a cell). In some embodiments, a construct can be a cosmid (e.g., pWE or sCos series).

[0185] Constructs provided herein can be of different sizes. In some embodiments, a construct is a plasmid and can include a total length of up to about 1 kb, up to about 2 kb, up to about 3 kb, up to about 4 kb, up to about 5 kb, up to about 6 kb, up to about 7 kb, up to about 8 kb, up to about 9 kb, up to about 10 kb, up to about 11 kb, up to about 12 kb, up to about 13 kb, up to about 14 kb, or up to about 15 kb. In some embodiments, a construct is a plasmid and can have a total length in a range of about 1 kb to about 2 kb, about 1 kb to about 3 kb, about 1 kb to about 4 kb, about 1 kb to about 5 kb, about 1 kb to about 6 kb, about 1 kb to about 7 kb, about 1 kb to about 8 kb, about 1 kb to about 9 kb, about 1 kb to about 10 kb, about 1 kb to about 11 kb, about 1 kb to about 12 kb, about 1 kb to about 13 kb, about 1 kb to about 14 kb, or about 1 kb to about 15 kb.

[0186] In some embodiments, a construct is a viral construct and can have a total number of nucleotides of up to 10 kb. In some embodiments, a viral construct can have a total number of nucleotides in the range of about 1 kb to about 2 kb, 1 kb to about 3 kb, about 1 kb to about 4 kb, about 1 kb to about 5 kb, about 1 kb to about 6 kb, about 1 kb to about 7 kb, about 1 kb to about 8 kb, about 1 kb to about 9 kb, about 1 kb to about 10 kb, about 2 kb to about 3 kb, about 2 kb to about 4 kb, about 2 kb to about 5 kb, about 2 kb to about 6 kb, about 2 kb to about 7 kb, about 2 kb to about 8 kb, about 2 kb to about 9 kb, about 2 kb to about 10 kb, about 3 kb to about 4 kb, about 3 kb to about 5 kb, about 3 kb to about 6 kb, about 3 kb to about 7 kb, about 3 kb to about 8 kb, about 3 kb to about 9 kb, about 3 kb to about 10 kb, about 4 kb to about 5 kb, about 4 kb to about 6 kb, about 4 kb to about 7 kb, about 4 kb to about 8 kb, about 4 kb to about 9 kb, about 4 kb to about 10 kb, about 5 kb to about 6 kb, about 5 kb to about 7 kb, about 5 kb to about 8 kb, about 5 kb to about 9 kb, about 5 kb to about 10 kb, about 6 kb to about 7 kb, about 6 kb to about 8 kb, about 6 kb to about 9 kb, about 6 kb to about 10 kb, about 7 kb to about 8 kb, about 7 kb to about 9 kb, about 7 kb to about 10 kb, about 8 kb to about 9 kb, about 8 kb to about 10 kb, or about 9 kb to about 10 kb.

[0187] In some embodiments, a construct is an adeno-associated virus (AAV) construct and can have a total number of nucleotides of up to 5 kb in a single construct. In some embodiments, an AAV construct can have a total number of nucleotides in the range of about 1 kb to about 2 kb, 1 kb to about 3 kb, about 1 kb to about 4 kb, about 1 kb to about 5 kb, about 2 kb to about 3 kb, about 2 kb to about 4 kb, about 2 kb to about 5 kb, about 3 kb to about 4 kb, about 3 kb to about 5 kb, about 4 kb to about 5 kb.

[0188] In some embodiments, a construct is a lentivirus construct and can have a total number of nucleotides of up to 8 kb. In some examples, a lentivirus construct can have a total number of nucleotides of about 1 kb to about 2 kb, about 1 kb to about 3 kb, about 1 kb to about 4 kb, about 1 kb to about 5 kb, about 1 kb to about 6 kb, about 1 kb to about 7 kb, about 1 kb to about 8 kb, about 2 kb to about 3 kb, about 2 kb to about 4 kb, about 2 kb to about 5 kb, about 2 kb to about 6 kb, about 2 kb to about 7 kb, about 2 kb to about 8 kb, about 3 kb to about 4 kb, about 3 kb to about 5 kb, about 3 kb to about 6 kb, about 3 kb to about 7 kb, about 3 kb to about 8 kb, about 4 kb to about 5 kb, about 4 kb to about 6 kb, about 4 kb to about 7 kb, about 4 kb to about 8 kb, about 5 kb to about 6 kb, about 5 kb to about 7 kb, about 5 kb to about 8 kb, about 6 kb to about 8 kb, about 6 kb to about 7 kb, or about 7 kb to about 8 kb

[0189] In some embodiments, a construct is an adenovirus construct and can have a total number of nucleotides of up to 8 kb. In some embodiments, an adenovirus construct can have a total number of nucleotides in the range of about 1 kb to about 2 kb, about 1 kb to about 3 kb, about 1 kb to about 4 kb, about 1 kb to about 5 kb, about 1 kb to about 6 kb, about 1 kb to about 7 kb, about 1 kb to about 8 kb, about 2 kb to about 3 kb, about 2 kb to about 4 kb, about 2 kb to about 5 kb, about 2 kb to about 6 kb, about 2 kb to about 7 kb, about 2 kb to about 8 kb, about 3 kb to about 4 kb, about 3 kb to about 5 kb, about 3 kb to about 6 kb, about 3 kb to about 7 kb, about 3 kb to about 8 kb, about 4 kb to about 5 kb, about 4 kb to about 6 kb, about 4 kb to about 7 kb, about 4 kb to about 8 kb, about 5 kb to about 6 kb, about 5 kb to about 7 kb, about 5 kb to about 8 kb, about 6 kb to about 7 kb, about 6 kb to about 8 kb, or about 7 kb to about 8 kb.

[0190] Any of the constructs described herein can further include a control sequence, e.g., a control sequence selected from the group of a transcription initiation sequence, a transcription termination sequence, a promoter sequence, an enhancer sequence, an RNA splicing sequence, a polyadenylation (polyA) sequence, a Kozak consensus sequence, and/or additional untranslated regions which may house pre- or post-transcriptional regulatory and/or control elements. In some embodiments, a promoter can be a native promoter, a constitutive promoter, an inducible promoter, and/or a tissue-specific promoter. Non-limiting examples of control sequences are described herein. The foregoing methods for producing recombinant constructs are not meant to be limiting, and other suitable methods will be apparent to the skilled artisan.

d. Viral Constructs

[0191] The present disclosure provides technologies (e.g., compositions, methods, etc.) that are or comprise viral constructs. In some embodiments, a viral construct is an adenovirus. In some embodiments, a viral construct is an adeno-associated virus (AAV). In some embodiments, a viral construct may also be based on an alphavirus. Alphaviruses include Sindbis (and VEEV) virus, Aura virus, Babanki virus, Barmah Forest virus, Bebaru virus, Cabassou virus, Chikungunya virus, Eastern equine encephalitis virus, Everglades virus, Fort Morgan virus, Getah virus, Highlands J virus, Kyzylagach virus, Mayaro virus, Me Tri virus, Middelburg virus, Mosso das Pedras virus, Mucambo virus, Ndumu virus, O'nyong-nyong virus, Pixuna virus, Rio Negro virus, Ross River virus, Salmon pancreas disease virus, Semliki Forest virus, Southern elephant seal virus, Tonate virus, Trocara virus, Una virus, Venezuelan equine encephalitis virus, Western equine encephalitis virus, and Whataroa virus. Generally, genomes of such viruses encode nonstructural (e.g., replicon) and structural proteins (e.g., capsid and envelope) that can be translated in cytoplasm of a host cell. Ross River virus, Sindbis virus, Semliki Forest virus (SFV), and Venezuelan equine encephalitis virus (VEEV) have all been used to develop viral transfer constructs for transgene delivery. Pseudotyped viruses may be formed by combining alphaviral envelope glycoproteins and retroviral capsids. Examples of alphaviral constructs can be found in U.S. Publication Nos. 20150050243, 20090305344, and 20060177819; constructs and methods of their making are incorporated herein by reference in their entireties.

i. AAV Constructs

[0192] Recombinant AAV constructs (“rAAVs”; see, e.g., Asokan et al., Mol. Ther. 20: 699-7080, 2012, which is herein incorporated by reference in its entirety) of the disclosure are typically comprised of (i) a transgene or a portion thereof and a regulatory sequence, and (ii) 5′ and 3′ AAV inverted terminal repeats (ITRs). It is this recombinant AAV construct which is packaged into a capsid protein and delivered to a selected target cell. In some embodiments, the transgene is a nucleic acid sequence (e.g., inhibitory nucleic acid sequence), heterologous to the construct sequences, which encodes a polypeptide, protein, functional RNA molecule (e.g., miRNA, miRNA inhibitor) or other gene product, of interest. A nucleic acid coding sequence is operatively linked to regulatory components in a manner which permits transgene transcription, translation, and/or expression in a cell of a target tissue. In some embodiments, a recombinant AAV construct is packaged into a capsid to form an rAAV particle and delivered to a selected target cell (e.g., an outer hair cell). In some embodiments, a recombinant AAV construct is packaged into a capsid to form an rAAV particle and delivered to the inner ear for expression in a selected target cell (e.g., an outer hair cell).

[0193] In some embodiments, and rAAV construct also comprises conventional control elements that are operably linked to a transgene in a manner which permits its transcription, translation and/or expression in a cell transfected with a plasmid construct or infected with a virus produced by the disclosure.

[0194] AAV constructs as described in the present disclosure may include one or more additional elements as described herein (e.g., regulatory elements e.g., one or more of a promoter, a polyA sequence, and an IRES).

[0195] Methods for obtaining viral constructs are known in the art. For example, to produce AAV constructs, methods typically involve culturing a host cell which comprises a nucleic acid sequence encoding an AAV capsid protein or fragment thereof, a functional rep gene; a recombinant AAV construct comprising an AAV inverted terminal repeats (ITRs) and a transgene; and/or sufficient helper functions to permit packaging of the recombinant AAV construct into AAV capsid proteins.

[0196] In some embodiments, components to be cultured in a host cell to package an AAV construct in an AAV capsid may be provided to the host cell in trans. Alternatively, one or more components (e.g., recombinant AAV construct, rep sequences, cap sequences, and/or helper functions) may be provided by a stable host cell that has been engineered to contain one or more such components using methods known to those of skill in the art. In some embodiments, such a stable host cell contains such component(s) under control of an inducible promoter. In some embodiments, such component(s) may be under control of a constitutive promoter. In some embodiments, a selected stable host cell may contain selected component(s) under control of a constitutive promoter and other selected component(s) under control of one or more inducible promoters. For example, a stable host cell may be generated that is derived from HEK293 cells (which contain E1 helper functions under the control of a constitutive promoter), but that contain rep and/or cap proteins under control of inducible promoters. Other stable host cells may be generated by one of skill in the art using routine methods.

[0197] Recombinant AAV construct, rep sequences, cap sequences, and helper functions required for producing an AAV of the disclosure may be delivered to a packaging host cell using any appropriate genetic element (e.g., construct). A selected genetic element may be delivered by any suitable method known in the art, e.g., to those with skill in nucleic acid manipulation and include genetic engineering, recombinant engineering, and synthetic techniques (see, e.g., Sambrook et al., Molecular Cloning: A Laboratory Manual, Cold Spring Harbor Press, Cold Spring Harbor, N.Y., which is incorporated in its entirety herein by reference). Similarly, methods of generating AAV virions are well known and any suitable method can be used with the present disclosure (see, e.g., K. Fisher et al., J. Virol., 70:520-532 (1993) and U.S. Pat. No. 5,478,745, each of which is incorporated in its entirety herein by reference).

[0198] In some embodiments, recombinant AAVs may be produced using a triple transfection method (e.g., as described in U.S. Pat. No. 6,001,650, which is incorporated in its entirety herein by reference). In some embodiments, recombinant AAVs are produced by transfecting a host cell with a recombinant AAV construct (comprising a transgene) to be packaged into AAV particles, an AAV helper function construct, and an accessory function construct. An AAV helper function construct encodes “AAV helper function” sequences (i.e., rep and cap), which function in trans for productive AAV replication and encapsidation. In some embodiments, an AAV helper function construct supports efficient AAV construct production without generating any detectable wild-type AAV virions (i.e., AAV virions containing functional rep and cap genes). Non-limiting examples of constructs suitable for use with the present disclosure include pHLP19 (see, e.g., U.S. Pat. No. 6,001,650, which is incorporated in its entirety herein by reference) and pRep6cap6 construct (see, e.g., U.S. Pat. No. 6,156,303, which is incorporated in its entirety herein by reference). An accessory function construct encodes nucleotide sequences for non-AAV derived viral and/or cellular functions upon which AAV is dependent for replication (i.e., “accessory functions”). Accessory functions may include those functions required for AAV replication, including, without limitation, those moieties involved in activation of AAV gene transcription, stage specific AAV mRNA splicing, AAV DNA replication, synthesis of cap expression products, and AAV capsid assembly. Viral-based accessory functions can be derived from any known helper viruses such as adenovirus, herpesvirus (other than herpes simplex virus type-1), and vaccinia virus.

[0199] Additional methods for generating and isolating AAV viral constructs suitable for delivery to a subject are described in, e.g., U.S. Pat. Nos. 7,790,449; 7,282,199; WO 2003/042397; WO 2005/033321, WO 2006/110689; and U.S. Pat. No. 7,588,772, each of which is incorporated in its entirety herein by reference. In one system, a producer cell line is transiently transfected with a construct that encodes a transgene flanked by ITRs and a construct(s) that encodes rep and cap. In another system, a packaging cell line that stably supplies rep and cap is transiently transfected with a construct encoding a transgene flanked by ITRs. In each of these systems, in some embodiments, AAV virions are produced in response to infection with helper adenovirus or herpesvirus, and AAVs are separated from contaminating virus. In some embodiments, systems do not require infection with helper virus to recover the AAV. As will be understood to those of skill in the art, in some embodiments, a helper function is or comprises at least one of e.g., adenovirus E1, E2a, VA, and E4 or herpesvirus UL5, UL8, UL52, and UL29, and herpesvirus polymerase. In some such embodiments, a helper function is supplied, in trans, by or to a given system. In some such embodiments, helper functions can be supplied by transient transfection of cells with constructs that encode helper functions. In some embodiments, cells can be engineered to stably contain genes encoding at least one helper function. In some such embodiments, where cells are stably engineered to contain genes encoding helper function(s) helper function expression can be controlled at a transcriptional or posttranscriptional level.

ii. AAV Serotypes

[0200] As described herein, in some embodiments, a viral construct of the present disclosure is an adeno-associated virus (AAV) construct. AAV systems are generally well known in the art (see, e.g., Kelleher and Vos, Biotechniques, 17(6):1110-17 (1994); Cotten et al., P.N.A.S. U.S.A., 89(13):6094-98 (1992); Curiel, Nat Immun, 13(2-3):141-64 (1994); Muzyczka, Curr Top Microbiol Immunol, 158:97-129 (1992); and Asokan A, et al., Mol. Ther., 20(4):699-708 (2012), each of which is incorporated in its entirety herein by reference). Methods for generating and using AAV constructs are described, for example, in U.S. Pat. Nos. 5,139,941 and 4,797,368, each of which is incorporated in its entirety herein by reference. Several AAV serotypes have been characterized, including AAV1, AAV2, AAV3 (e.g., AAV3B), AAV4, AAV5, AAV6, AAV7, AAV8, AAV9, AAV10, and AAV11, as well as variants thereof. In some embodiments, an AAV construct is an AAV2/6, AAV2/8 or AAV2/9 construct (e.g., AAV6, AAV8 or AAV9 serotype having AAV2 ITR). Other AAV constructs are described in, e.g., Sharma et al., Brain Res Bull. 2010 Feb. 15; 81(2-3): 273, which is incorporated in its entirety herein by reference. Generally, any AAV serotype may be used to deliver a transgene described herein. However, serotypes are known to have different tropisms, e.g., they preferentially infect different tissues. In some embodiments, an AAV construct is a self-complementary AAV construct.

iii. Capsids

[0201] In some embodiments, one or more recombinant AAV constructs of the present disclosure is packaged into a capsid of AAV2, 3, 4, 5, 6, 7, 8, 9, 10, rh8, rh10, rh39, rh43, AAV2.7m8, AAV8BP2, or Anc80 serotype or one or more hybrids thereof. In some embodiments, a capsid is from an ancestral serotype. For example, in some embodiments, a capsid is an Anc80 capsid (e.g., an Anc80L65 capsid). In some embodiments, a capsid comprises a polypeptide represented by SEQ ID NO: 14. In some embodiments, a capsid comprises a polypeptide with at least 85%, 90%, 95%, 98% or 99% sequence identity to a polypeptide of SEQ ID NO: 14.

[0202] Any combination of ITRs and capsids may be used in recombinant AAV constructs of the present disclosure, for example, wild-type or variant AAV2 ITRs and Anc80 capsid, wild-type or variant AAV2 ITRs and AAV6 capsid, etc. In some embodiments of the present disclosure, an rAAV particle is wholly comprised of AAV2 components (i.e., capsid and ITRs are AAV2 serotype). In some embodiments of the present disclosure an rAAV particle is an rAAV2/Anc80 particle which comprises an Anc80 capsid (e.g., comprising a polypeptide of SEQ ID NO: 14) that encapsidates a nucleic acid construct with wild-type AAV2 ITRs (e.g., any of SEQ ID NOs: 15, 16, 17, 18, 19, 20 and/or 21) flanking a portion of a construct comprising all or a characteristic portion of a KCNQ4 encoding sequence (e.g., SEQ ID NOs:1-10). In some embodiments, an ITR is at least 85%, 90%, 95%, 98% or 99% identical to an ITR of SEQ ID NOs: 15, 16, 17, 18, 19, 20, or 21.

iv. Inverted Terminal Repeat Sequences (ITRs)

[0203] AAV sequences of a construct typically comprise the cis-acting 5′ and 3′ inverted terminal repeat sequences (See, e.g., B. J. Carter, in “Handbook of Parvoviruses,” ed., P. Tijsser, CRC Press, pp. 155 168 (1990), which is incorporated in its entirety herein by reference). In some embodiments, ITR sequences are about 145 nt in length. For example, wild type AAV2 ITRs are generally about 145 nt in length. Preferably, substantially the entire sequences encoding ITRs are used in a given molecule, although some degree of minor modification of these sequences is permissible. Ability to modify ITR sequences is within the skill of the art. (See, e.g., texts such as Sambrook et al. “Molecular Cloning. A Laboratory Manual,” 2d ed., Cold Spring Harbor Laboratory, New York (1989); and K. Fisher et al., J Virol., 70:520 532 (1996), each of which is incorporated in its entirety herein by reference). An example of such a molecule employed in the present disclosure is a “cis-acting” construct comprising a sequence encoding a gene product (e.g., a KCNQ4 gene product) or inhibitory nucleic acid thereof (e.g., an miRNA), in which such a sequence and its associated regulatory elements are flanked by 5′ or “left” and 3′ or “right” AAV ITR sequences. 5′ and left designations refer to a position of an ITR sequence relative to an entire construct, read left to right, in a sense direction. For example, in some embodiments, a 5′ or left ITR is an ITR that is closest to a promoter (as opposed to a polyadenylation sequence) for a given construct, when a construct is depicted in a sense orientation, linearly. 3′ and right designations refer to a position of an ITR sequence relative to an entire construct, read left to right, in a sense direction. For example, in some embodiments, a 3′ or right ITR is an ITR that is closest to a polyadenylation sequence (as opposed to a promoter sequence) for a given construct, when a construct is depicted in a sense orientation, linearly. ITRs as provided herein are depicted in 5′ to 3′ order in accordance with a sense strand. Accordingly, one of skill in the art will appreciate that a 5′ or “left” orientation ITR can also be depicted as a 3′ or “right” ITR when converting from sense to antisense direction. Further, it is well within the ability of one of skill in the art to transform a given sense ITR sequence (e.g., a 5′/left AAV ITR) into an antisense sequence (e.g., 3′/right ITR sequence). Accordingly, based upon known AAV ITRs one of skill in the art would understand, in looking at sequences disclosed herein, whether an ITR was in a sense or antisense orientation and whether it would go on a “left” or “right” side of a construct, whether or not it is explicitly labeled as such. One of ordinary skill in the art would understand how to modify a given ITR sequence for use as either a 5′/left or 3′/right ITR, or an antisense version thereof.

[0204] AAV ITR sequences may be obtained from any known AAV, including presently identified mammalian AAV types. In some embodiments, an ITR is or comprises 145 nucleotides. In some embodiments an ITR is a wild-type AAV2 ITR, e.g., the 5′ ITR of SEQ ID NO: 15 and the 3′ ITR of SEQ ID NO: 16. In some embodiments an ITR is derived from a wild-type AAV2 ITR and includes one or more modifications, e.g., truncations, deletions, substitutions or insertions as is known in the art. In some embodiments, an ITR comprises fewer than 145 nucleotides (e.g., SEQ ID NO:s 19 or 20), e.g., 119, 127, 130, 134 or 141 nucleotides (see, e.g., SEQ ID Nos: 17, 18, 19, and 20. For example, in some embodiments, an ITR comprises 110, 111, 112, 113, 114, 115, 116, 117, 118, 119, 120, 121, 122, 123,124, 125, 126, 127, 128, 129, 130, 131, 132, 133, 134, 135, 136, 137, 138, 139, 140, 141, 142, 143 144, or 145 nucleotides.

[0205] A non-limiting example of a 5′/left AAV ITR sequence is SEQ ID NO: 17. A non-limiting example of a 3′/right AAV ITR sequence is SEQ ID NO: 18. In some embodiments, constructs and/or constructs of the present disclosure comprise a 5′/left AAV ITR and/or a 3′/right AAV ITR. In some embodiments, a 5′/left AAV ITR sequence is SEQ ID NO: 16. In some embodiments, a 3′/right AAV ITR sequence is SEQ ID NO: 16. In some embodiments, a 5′/left AAV ITR sequence is SEQ ID NO: 15 and a 3′/right AAV ITR sequence is SEQ ID NO: 16. In some embodiments, an ITR is at least 85%, 90%, 95%, 98% or 99% identical to the ITR represented by SEQ ID NOs: 15, 16, 17, 18, or 19. In some embodiments, 5′/left and a 3′/right AAV ITRs (e.g., SEQ ID NOs: 15 and 16) flank a portion of a transgene and/or construct comprising all or a portion of a KCNQ4 gene product (e.g., SEQ ID NOs: 1-10).

[0206] In some embodiments, an ITR sequence is at least 85%, 90%, 95%, 98% or 99% identical to any ITR sequence disclosed herein. By way of non-limiting example, ITR sequences may be or comprise the following sequences according to SEQ ID NOs. 15-21 or 311-313.

v. Promoters

[0207] Non-limiting examples of promoters are described herein. Additional examples of promoters are known in the art.

[0208] In some embodiments, a construct (e.g., an rAAV construct) comprises a promoter. The term “promoter” refers to a DNA sequence recognized by enzymes/proteins that can promote and/or initiate transcription of an operably linked gene (e.g., an KCNQ4 gene or inhibitory nucleic acid thereof). In some embodiments, a construct encoding a KCNQ4 gene product (e.g., a human Kv7.4 protein, etc.) or inhibitory nucleic acid thereof (e.g., an miRNA, etc.) can include a promoter and/or an enhancer. For example, a promoter typically refers to, e.g., a nucleotide sequence to which an RNA polymerase and/or any associated factor binds and from which it can initiate transcription. Thus, in some embodiments, a construct (e.g., an rAAV construct) comprises a promoter operably linked to one of the non-limiting example promoters described herein.

[0209] In some embodiments, a promoter is an inducible promoter, a constitutive promoter, a mammalian cell promoter, a viral promoter, a chimeric promoter, an engineered promoter, a tissue-specific promoter, or any other type of promoter known in the art. In some embodiments, a promoter is a RNA polymerase II promoter, such as a mammalian RNA polymerase II promoter. In some embodiments, a promoter is a RNA polymerase III promoter, including, but not limited to, a HI promoter, a human U6 promoter, a mouse U6 promoter, or a swine U6 promoter. An exemplary sequence U6 promoter may be or comprise a sequence according to SEQ ID NO: 314.

[0210] In some embodiments that include an inhibitory nucleotide, e.g., an miRNA, guide RNA, or DNA encoding an miRNA or guide RNA, a U6 promoter can promote and/or initiate transcription of the inhibitory nucleotide.

[0211] In some embodiments, a promoter can be a promoter that, in its endogenous context, is associated with a gene in the CRISPR/Cas system. For example, in some embodiments, a promoter can be a Cas gene promoter. In some embodiments, a promoter can be a Cas9 promoter. An exemplary sequence Cas9 promoter may be or comprise a sequence according to SEQ ID NO: 99.

[0212] In some embodiments that include an inhibitory nucleotide, e.g., an miRNA, guide RNA, or DNA encoding an miRNA or guide RNA, a Cas9 promoter can promote and/or initiate transcription of the inhibitory nucleotide.

[0213] A promoter will generally be one that is able to promote transcription in an inner ear cell. In some embodiments, a promoter is a cochlea-specific promoter or a cochlea-oriented promoter. In some embodiments, a promoter is a hair cell specific promoter, or a supporting cell specific promoter.

[0214] A variety of promoters are known in the art, which can be used herein. Non-limiting examples of promoters that can be used herein include: a human EFlα promoter, a human cytomegalovirus (CMV) promoter (U.S. Pat. No. 5,168,062, which is incorporated in its entirety herein by reference), a human ubiquitin C (UBC) promoter, a mouse phosphoglycerate kinase 1 promoter, a polyoma adenovirus promoter, a simian virus 40 (SV40) promoter, a β-globin promoter, a β-actin promoter, an α-fetoprotein promoter, a γ-globin promoter, a β-interferon promoter, a γ-glutamyl transferase promoter, a mouse mammary tumor virus (MMTV) promoter, a Rous sarcoma virus promoter, a rat insulin promoter, a glyceraldehyde-3-phosphate dehydrogenase promoter, a metallothionein II (MT II) promoter, an amylase promoter, a cathepsin promoter, a MI muscarinic receptor promoter, a retroviral LTR (e.g., human T-cell leukemia virus HTLV) promoter, an AAV ITR promoter, an interleukin-2 promoter, collagenase promoter, a platelet-derived growth factor promoter, an adenovirus 5 E2 promoter, a stromelysin promoter, a murine MX gene promoter, a glucose regulated proteins (GRP78 and GRP94) promoter, an α-2-macroglobulin promoter, a vimentin promoter, an MHC class I gene H-2_{K} b promoter, a HSP70 promoter, a proliferin promoter, a tumor necrosis factor promoter, a thyroid stimulating hormone a gene promoter, an immunoglobulin light chain promoter, a T-cell receptor promoter, a HLA DQa and DQ promoter, an interleukin-2 receptor promoter, an MHC class II promoter, an MHC class II HLA-DRa promoter, a muscle creatine kinase promoter, a prealbumin (transthyretin) promoter, an elastase I promoter, an albumin gene promoter, a c-fos promoter, a c-HA-ras promoter, a neural cell adhesion molecule (NCAM) promoter, an H2B (TH2B) histone promoter, a rat growth hormone promoter, a human serum amyloid (SAA) promoter, a troponin I (TN I) promoter, a duchenne muscular dystrophy promoter, a human immunodeficiency virus promoter, a CHRNA10 promoter, a DNM3 promoter, an MUC15 promoter, a PLBD1 promoter, a RORB promoter, a STRIP2 promoter, a AQP11 promoter, a KCNQ4 promoter, a LBH promoter, or a Gibbon Ape Leukemia Virus (GALV) promoter. Additional examples of promoters are known in the art. See, e.g., Lodish, Molecular Cell Biology, Freeman and Company, New York 2007, each of which is incorporated in its entirety herein by reference. In some embodiments, a promoter is the CMV immediate early promoter.

[0215] In some embodiments, a promoter is an inducible promoter, a mammalian cell promoter, a viral promoter, a chimeric promoter, an engineered promoter, a constitutive promoter, a tissue-specific promoter, or any other type of promoter known in the art.

[0216] In some embodiments, a promoter is a RNA polymerase II promoter, such as a mammalian RNA polymerase II promoter.

[0217] In some embodiments, a promoter is a RNA polymerase III promoter (e.g., an H1 promoter, a U6 promoter (e.g., a human U6 promoter, a mouse U6 promoter, a swine U6 promoter, etc.).

[0218] In some embodiments, a promoter of the present disclosure will generally be one that is able to function (i.e., transcribe), in cochlear cells such as hair cells, e.g., IHCs, e.g., OHCs.

[0219] In some embodiments, a promoter is a cochlea-specific promoter or a cochlea-oriented promoter.

[0220] A variety of promoters is known in the art, any of which can be used herein. Non-limiting examples of promoters that can be used herein include promoters for: human elongation factor 1α-subunit (EF1a) (Liu et al. (2007) Exp. Mol. Med. 39(2): 170-175; Accession No. J04617.1; Gill et al., Gene Ther. 8(20):1539-1546, 2001; Xu et al., Human Gene Ther. 12(5):563-573, 2001; Xu et al., Gene Ther. 8:1323-1332; Ikeda et al., Gene Ther. 9:932-938,_2002; Gilham et al., J. Gene Med 12(2):129-136, 2010, each of which is incorporated in its entirety herein by reference), cytomegalovirus (Xu et al., Human Gene Ther. 12(5):563-573, 2001; Xu et al., Gene Ther. 8:1323-1332; Gray et al., Human Gene Ther. 22:1143-1153, 2011, each of which is incorporated in its entirety herein by reference), human immediate-early cytomegalovirus (CMV) (U.S. Pat. No. 5,168,062, Liu et al. (2007) Exp. Mol. Med. 39(2): 170-175; Accession No. X17403.1 or KY490085.1, each of which is incorporated in its entirety herein by reference), human ubiquitin C (UBC) (Gill et al., Gene Ther. 8(20):1539-1546, 2001; Qin et al., PLoS One 5(5):e10611, 2010, each of which is incorporated in its entirety herein by reference), mouse phosphoglycerate kinase 1, polyoma adenovirus, simian virus 40 (SV40), β-globin, β-actin, α-fetoprotein, γ-globin, β-interferon, γ-glutamyl transferase, mouse mammary tumor virus (MMTV), Rous sarcoma virus, rat insulin, glyceraldehyde-3-phosphate dehydrogenase, metallothionein II (MT II), amylase, cathepsin, MI muscarinic receptor, retroviral LTR (e.g., human T-cell leukemia virus HTLV, each of which is incorporated in its entirety herein by reference), AAV ITR, interleukin-2, collagenase, platelet-derived growth factor, adenovirus 5 E2, stromelysin, murine MX gene, glucose regulated proteins (GRP78 and GRP94), α-2-macroglobulin, vimentin, MHC class I gene H-2κ b, HSP70, proliferin, tumor necrosis factor, thyroid stimulating hormone a gene, immunoglobulin light chain, T-cell receptor, HLA DQα and DQβ, interleukin-2 receptor, MHC class II, MHC class II HLA-DRα, muscle creatine kinase, prealbumin (transthyretin), elastase I, albumin gene, c-fos, c-HA-ras, neural cell adhesion molecule (NCAM), H2B (TH2B) histone, rat growth hormone, human serum amyloid (SAA), troponin I (TN I), duchenne muscular dystrophy, human immunodeficiency virus, Gibbon Ape Leukemia Virus (GALV) promoters, promoter of HNRPA2B1-CBX1 (UCOE) (Powell and Gray (2015) Discov. Med. 19(102): 49-57; Antoniou et al., Human Gene Ther. 24(4):363-374, 2013), β-glucuronidase (GUSB) (Husain et al., Gene Ther. 16:927-932, 2009), chicken β-actin (CBA) (Liu et al. (2007) Exp. Mol. Med. 39(2): 170-175; Stone et al. (2005) Mol. Ther. 11(6): 843-848; Klein et al., Exp. Neurol. 176(1):66-74, 2002; Ohlfest et al., Blood 105:2691-2698, 2005; Gray et al., Human Gene Ther. 22:1143-1153, 2011, each of which is incorporated in its entirety herein by reference), a human β-actin promoter (HBA) (Accession No. Y00474.1), murine myosin VIIA (musMyo7) (Boeda et al. (2001) Hum. Mol. Genet. 10(15): 1581-1589; Accession No. AF384559.1, each of which is incorporated in its entirety herein by reference), human myosin VIIA (hsMyo7) (Boeda et al. (2001) Hum. Mol. Genet. 10(15): 1581-1589; Accession No. NG_009086.1, each of which is incorporated in its entirety herein by reference), murine poly(ADP-ribose) polymerase 2 (musPARP2) (Ame et al. (2001) J. Biol. Chem. 276(14): 11092-11099; Accession No. AF191547.1, each of which is incorporated in its entirety herein by reference), human poly(ADP-ribose) polymerase 2 (hsPARP2) (Ame et al. (2001) J. Biol. Chem. 276(14): 11092-11099; Accession No. X16612.1 or AF479321.1, each of which is incorporated in its entirety herein by reference), acetylcholine receptor epsilon-subunit (AChF) (Duclert et al. (1993) PNAS 90(7): 3043-3047; Accession No. S58221.1 or CR933736.12, each of which is incorporated in its entirety herein by reference), Rous sarcoma virus (RSV) (Liu et al. (2007) Exp. Mol. Med. 39(2): 170-175; Accession No. M77786.1, each of which is incorporated in its entirety herein by reference), (GFAP) (Liu et al. (2007) Exp. Mol. Med. 39(2): 170-175; Stone et al. (2005) Mol. Ther. 11(6): 843-848; Accession No. NG_008401.1 or M67446.1, each of which is incorporated in its entirety herein by reference), hAAT (Van Linthout et al., Human Gene Ther. 13(7):829-840, 2002; Cunningham et al., Mol. Ther. 16(6):1081-1088, 2008, each of which is incorporated in its entirety herein by reference), and a CBA hybrid (CBh) (Gray et al. (2011) Hum. Gen. Therapy 22: 1143-1153; Accession No. KF926476.1 or KC152483.1, each of which is incorporated in its entirety herein by reference). Additional examples of promoters are known in the art. See, e.g., Lodish, Molecular Cell Biology, Freeman and Company, New York 2007.

[0221] In some embodiments, a promoter is a CMV immediate early promoter.

[0222] In some embodiments, a promoter is a CAG promoter or a CAG/CBA promoter.

[0223] In some embodiments, a promoter is an smCBA promoter.

[0224] In some embodiments, a construct or construct of the present disclosure comprises a CAG promoter. In some embodiments, a CAG promoter comprises, in order from 5′ to 3′, nucleotide sequences of SEQ ID NOs: 22, 23, and 24. In some such embodiments, a CAG promoter comprises a CMV early enhancer element (e.g., SEQ ID NO: 22 or SEQ ID NO: 298 or SEQ ID NO: 299), a chicken beta actin (CBA) gene sequence (e.g., SEQ ID NO: 23), and a chimeric intron/3′ splice sequence from a rabbit beta globin gene (e.g., SEQ ID NO: 24). In some embodiments, a promoter is at least 85%, 90%, 95%, 98% or 99% identical to CAG promoter represented by SEQ ID NOs: 22, 23, 24, 300, or 301.

[0225] The term “constitutive” promoter refers to a nucleotide sequence that, when operably linked with a nucleic acid encoding a protein (e.g., a KCNQ4 protein) or an inhibitory nucleic acid (e.g., as described herein), causes RNA to be transcribed from the nucleic acid in a cell under most or all physiological conditions.

[0226] Examples of constitutive promoters include, without limitation, a retroviral Rous sarcoma virus (RSV) LTR promoter, a cytomegalovirus (CMV) promoter (see, e.g., Boshart et al. Cell 41:521-530, 1985, which is incorporated in its entirety herein by reference), an SV40 promoter, a dihydrofolate reductase promoter, a beta-actin promoter, a phosphoglycerol kinase (PGK) promoter, and an EF1-alpha promoter (Invitrogen).

[0227] In some embodiments, inducible promoters allow regulation of gene expression and can be regulated by exogenously supplied compounds, environmental factors such as temperature, or presence of a specific physiological state, e.g., acute phase, a particular functional or biological state of a cell, e.g., a particular differentiation state of a cell, or in replicating cells only. Inducible promoters and inducible systems are available from a variety of commercial sources, including, without limitation, Invitrogen, Clontech, and Ariad. Additional examples of inducible promoters are known in the art.

[0228] Examples of inducible promoters regulated by exogenously supplied compounds include a zinc-inducible sheep metallothionine (MT) promoter, a dexamethasone (Dex)-inducible mouse mammary tumor virus (MMTV) promoter, a T7 polymerase promoter system (WO 98/10088, which is incorporated in its entirety herein by reference); an ecdysone insect promoter (No et al. Proc. Natl. Acad. Sci. U.S.A. 93:3346-3351, 1996, which is incorporated in its entirety herein by reference), a tetracycline-repressible system (Gossen et al. Proc. Natl. Acad. Sci. U.S.A. 89:5547-5551, 1992, which is incorporated in its entirety herein by reference), a tetracycline-inducible system (Gossen et al. Science 268:1766-1769, 1995, see also Harvey et al. Curr. Opin. Chem. Biol. 2:512-518, 1998, each of which is incorporated in its entirety herein by reference), an RU486-inducible system (Wang et al. Nat. Biotech. 15:239-243, 1997; and Wang et al. Gene Ther. 4:432-441, 1997, each of which is incorporated in its entirety herein by reference), and a rapamycin-inducible system (Magari et al. J. Clin. Invest. 100:2865-2872, 1997, which is incorporated in its entirety herein by reference).

[0229] In some embodiments, regulatory sequences impart tissue-specific gene expression capabilities. In some cases, tissue-specific regulatory sequences bind tissue-specific transcription factors that induce transcription in a tissue-specific manner.

[0230] The term “tissue-specific” promoter refers to a promoter that is active only in certain specific cell types and/or tissues (e.g., transcription of a specific gene occurs only within cells expressing transcription regulatory and/or control proteins that bind to the tissue-specific promoter).

[0231] In some embodiments, a tissue-specific promoter is a cochlea-specific promoter. In some embodiments, the tissue-specific promoter is a cochlear hair cell-specific promoter. Non-limiting examples of cochlear hair cell-specific promoters include but are not limited to an ATOH1 promoter, a POU4F3 promoter, an LHX3 promoter, a MYO7A promoter, a MYO6 promoter, an α9ACHR promoter, and aa α10ACHR promoter. In some embodiments, a promoter is a cochlear hair cell-specific promoter such as a Prestin promoter or an ONCOMOD promoter. See, e.g., Zheng et al., Nature 405:149-155, 2000; Tian et al. Dev. Dyn. 23 1: 199-203, 2004; and Ryan et al., Adv. Otorhinolaryngol. 66: 99-115, 2009, each of which is incorporated in their entirety herein by reference.

[0232] In some embodiments, a tissue-specific promoter is an ear cell specific promoter. In some embodiments, a tissue-specific promoter is an inner ear cell specific promoter. Non-limiting examples of inner ear non-sensory cell-specific promoters include but are not limited to: GJB2, GJB6, SLC26A4, TECTA, DFNA5, COCH, NDP, SYN1, GFAP, PLP, TAK1, or SOX21. In some embodiments, a cochlear non-sensory cell specific promoter may be an inner ear supporting cell specific promoter. Non-limiting examples of inner ear supporting cell specific promoters include but are not limited to: SOX2, FGFR3, PROX1, GLAST1, LGR5, HES1, HESS, NOTCH1, JAG1, CDK1A, CDKN1B, SOX10, P75, CD44, HEY2, LFNG, or S100b.

[0233] In some embodiments, provided AAV constructs comprise a promoter sequence selected from a CAG, a CBA, a CMV, or a CB7 promoter. In some embodiments of any of the therapeutic compositions described herein, the first or sole AAV construct further includes at least one promoter sequence selected from Cochlea and/or inner ear specific promoters.

[0234] In some embodiments, constructs comprise a CHRNA10 promoter, a DNM3 promoter, a MUC15 promoter, a PLBD1 promoter, a RORB promoter, a STRIP2 promoter, a AQP11 promoter, a KCNQ4 promoter, a LBH promoter, a STRC promoter, a TUBA8 promoter, an OCM promoter, a truncated (or “short”) OCM promoter, a Prestin promoter, or a truncated (or “short”) Prestin promoter.

[0235] In some embodiments, a promoter sequence is at least 85%, 90%, 95%, 98% or 99% identical to any promoter sequence disclosed herein. By way of non-limiting example, promoter sequences provided in accordance with the present disclosure may be or comprise a sequence according to SEQ ID NOs. 22, 23, 24, 297-301, or 315-329.

[0236] In certain embodiments, a promoter is an endogenous human ATOH enhancer-promoter as set forth in SEQ ID NO: 302. In some embodiments, an enhancer-promoter sequence is at least 85%, 90%, 95%, 98% or 99% identical to enhancer-promoter sequence represented by SEQ ID NO: 302.

[0237] In certain embodiments, a promoter is an endogenous human SLC26A4 immediate promoter as set forth in SEQ ID NO: 303 or 304. In certain embodiments, a promoter is an endogenous human SLC26A4 enhancer-promoter as set forth in SEQ ID NO: 305, 306, or 307. In some embodiments, an enhancer-promoter sequence is at least 85%, 90%, 95%, 98% or 99% identical to a promoter or enhancer-promoter sequence represented by SEQ ID NO: 303, 304, 305, 306, or 307. In certain embodiments, a promoter is a human SLC26A4 endogenous enhancer-promoter sequence comprised within SEQ ID NO: 305, 306, or 307.

[0238] In certain embodiments, a promoter is a human LGR5 enhancer-promoter as set forth in SEQ ID NO: 308. In some embodiments, an enhancer-promoter sequence is at least 85%, 90%, 95%, 98% or 99% identical to enhancer-promoter sequence represented by SEQ ID NO: 308. In some embodiments, a promoter is a human LGR5 endogenous enhancer-promoter sequence comprised within SEQ ID NO: 308.

[0239] In certain embodiments, a promoter is a human SYN1 enhancer-promoter as set forth in SEQ ID NO: 309. In some embodiments, an enhancer-promoter sequence is at least 85%, 90%, 95%, 98% or 99% identical to enhancer-promoter sequence represented by SEQ ID NO: 309. In some embodiments, a promoter is a human SYN1 endogenous enhancer-promoter sequence comprised within SEQ ID NO: 309.

[0240] In certain embodiments, a promoter is a human GFAP enhancer-promoter as set forth in SEQ ID NO: 310. In some embodiments, an enhancer-promoter sequence is at least 85%, 90%, 95%, 98% or 99% identical to enhancer-promoter sequence represented by SEQ ID NO: 310. In some embodiments, a promoter is a human GFAP endogenous enhancer-promoter sequence comprised within SEQ ID NO: 310.

vi. Enhancers and 5′ Cap

[0241] In some instances, a construct can include a promoter sequence and/or an enhancer sequence. In some embodiments, an enhancer is a nucleotide sequence that can increase a level of transcription of a nucleic acid encoding a protein of interest (e.g., a KCNQ4 protein). In some embodiments, enhancer sequences (50-1500 base pairs in length) generally increase a level of transcription by providing additional binding sites for transcription-associated proteins (e.g., transcription factors). In some embodiments, an enhancer sequence is found within an intronic sequence. Unlike promoter sequences, enhancer sequences can act at much larger distance away from a transcription start site (e.g., as compared to a promoter). Non-limiting examples of enhancers include a RSV enhancer, a CMV enhancer, and a SV40 enhancer. An example of a CMV enhancer is described in, e.g., Boshart et al., Cell 41(2):521-530, 1985, which is incorporated in its entirety herein by reference.

[0242] As described herein, a 5′ cap (also termed an RNA cap, an RNA 7-methylguanosine cap or an RNA m.sup.7G cap) is a modified guanine nucleotide that has been added to a “front” or 5′ end of a eukaryotic messenger RNA shortly after a start of transcription. In some embodiments, a 5′ cap consists of a terminal group which is linked to a first transcribed nucleotide. Its presence is critical for recognition by a ribosome and protection from RNases. Cap addition is coupled to transcription, and occurs co-transcriptionally, such that each influences the other. Shortly after start of transcription, a 5′ end of an mRNA being synthesized is bound by a cap-synthesizing complex associated with RNA polymerase. This enzymatic complex catalyzes a chemical reactions that are required for mRNA capping. Synthesis proceeds as a multi-step biochemical reaction. A capping moiety can be modified to modulate functionality of mRNA such as its stability or efficiency of translation.

vii. Untranslated Regions (UTRs)

[0243] In some embodiments, any constructs described herein can include one or more untranslated regions. In some embodiments, a construct can include a 5′ UTR and/or a 3′ UTR. In some embodiments, if more than one UTR is present, UTRs may come from a single gene or more than one gene.

[0244] As is understood by those of skill in the art, an untranslated region (UTR) of a gene is transcribed but not translated. In some embodiments, a 5′ UTR starts at a transcription start site and continues to a start codon but does not include that start codon. In some embodiments, a 3′ UTR starts immediately following a stop codon and continues until a transcriptional termination signal. Without wishing to be bound by any particular theory, there is a growing body of evidence regarding regulatory roles played by UTRs in terms of stability of nucleic acid molecule and translation. In some embodiments, regulatory features of a UTR can be incorporated into any technologies (e.g., constructs, compositions, kits, or methods) as described herein to, e.g., enhance stability of a KCNQ4 protein.

[0245] For example, in some embodiments, a 5′ UTR is included in any constructs described herein. Non-limiting examples of 5′ UTRs including those from the following genes: albumin, serum amyloid A, Apolipoprotein A/B/E, transferrin, alpha fetoprotein, erythropoietin, and Factor VIII, can be used to enhance expression of a nucleic acid molecule, such as a mRNA. In some embodiments, 5′ UTRs have also been known, e.g., to form secondary structures that are involved in elongation factor binding.

[0246] In some embodiments, a 5′ UTR from an mRNA that is transcribed by a cell in a cochlea can be included in any technologies (e.g., constructs, compositions, kits, and methods) described herein.

[0247] In some embodiments, 3′ UTRs are known to have stretches of adenosines and uridines embedded in them. These AU-rich signatures are particularly prevalent in genes with high rates of turnover. Based on their sequence features and functional properties, AU-rich elements (AREs) can be separated into three classes (Chen et al., Mol. Cell. Biol. 15:5777-5788, 1995; Chen et al., Mol. Cell Biol. 15:2010-2018, 1995, each of which is incorporated in its entirety herein by reference): Class I AREs contain several dispersed copies of an AUUUA motif within U-rich regions. For example, c-Myc and MyoD mRNAs contain class I AREs. Class II AREs possess two or more overlapping UUAUUUA(U/A) (U/A) nonamers. GM-CSF and TNF-alpha mRNAs are examples that contain class II AREs. Class III AREs are less well defined. These U-rich regions do not contain an AUUUA motif. Two well-studied examples of this class are c-Jun and myogenin mRNAs.

[0248] Most proteins binding to AREs are known to destabilize a messenger, whereas members of the ELAV family, most notably HuR, have been documented to increase stability of mRNA. HuR binds to AREs of all three classes. Engineering HuR specific binding sites into a 3′ UTR of nucleic acid molecules will lead to HuR binding and thus, stabilization of a message in vivo.

[0249] In some embodiments, introduction, removal, or modification of 3′ UTR AREs can be used to modulate stability of an mRNA encoding a KCNQ4 protein (Kv7.4). In other embodiments, AREs can be removed or mutated to increase intracellular stability and thus increase translation and production of a KCNQ4 protein (Kv7.4).

[0250] In some embodiments, a UTR sequence is at least 85%, 90%, 95%, 98% or 99% identical to any UTR sequence disclosed herein (e.g., SEQ ID Nos: 25, 26, 27, 28, 29, and/or 30). By way of non-limiting example, untranslated regions may be or comprise a sequence according to SEQ ID NOs. 25-30, or 330.

viii. Kozak Sequences

[0251] In some embodiments, a construct of the present disclosure comprises one or more Kozak sequences. In some embodiments, natural 5′ UTRs include a sequence that plays a role in translation initiation. For example, in some embodiments, they harbor signatures like Kozak sequences, which are commonly known to be involved in a process by which a ribosome initiates translation of many genes. Kozak sequences generally have a consensus sequence CCR(A/G)CCAUGG, where R is a purine (A or G) three bases upstream of a start codon (AUG), which is followed by another “G”. In some embodiments, Kozak sequences may be included in synthetic or additional sequence elements, such as cloning sites.

ix. Internal Ribosome Entry Site (IRES)

[0252] In some embodiments, a construct of the present disclosure comprises one or more polynucleotide internal ribosome entry site (IRES). For example, in some embodiments, a construct of the present disclosure (e.g., a construct encoding a KCNQ4 gene product (e.g., human Kv7.4 protein, etc.) may include an IRES. In some embodiments, an IRES sequence is used to produce more than one polypeptide from a single gene transcript. In some embodiments, an IRES forms a complex secondary structure that allows translation initiation to occur from any position with an mRNA immediately downstream from where an IRES is located (see, e.g., Pelletier and Sonenberg, Mol. Cell. Biol. 8(3):1103-1112, 1988, which is incorporated in its entirety herein by reference).

[0253] There are several IRES sequences known to those skilled in the art, including those from, e.g., foot and mouth disease virus (FMDV), encephalomyocarditis virus (EMCV), human rhinovirus (HRV), cricket paralysis virus, human immunodeficiency virus (HIV), hepatitis A virus (HAV), hepatitis C virus (HCV), and poliovirus (PV). See e.g., Alberts, Molecular Biology of the Cell, Garland Science, 2002; and Hellen et al., Genes Dev. 15(13):1593-612, 2001, each of which is incorporated in its entirety herein by reference.

[0254] In some embodiments, an IRES sequence incorporated into a construct that encodes a KCNQ4 gene product (e.g., human Kv7.4 protein, etc.) or inhibitory nucleic acid (e.g., miRNA, etc.) thereof is foot and mouth disease virus (FMDV). Foot and Mouth Disease Virus 2A sequence is a small peptide (approximately 18 amino acids in length) that has been shown to mediate cleavage of polyproteins (Ryan, M D et al., EMBO 4:928-933, 1994; Mattion et al., J. Virology 70:8124-8127, 1996; Furler et al., Gene Therapy 8:864-873, 2001; and Halpin et al., Plant Journal 4:453-459, 1999, each of which is incorporated in its entirety herein by reference). Cleavage activity of the 2A sequence has previously been demonstrated in artificial systems including plasmids and gene therapy constructs (AAV and retroviruses) (Ryan et al., EMBO 4:928-933, 1994; Mattion et al., J. Virology 70:8124-8127, 1996; Furler et al., Gene Therapy 8:864-873, 2001; and Halpin et al., Plant Journal 4:453-459, 1999; de Felipe et al., Gene Therapy 6:198-208, 1999; de Felipe et al., Human Gene Therapy 11:1921-1931, 2000; and Klump et al., Gene Therapy 8:811-817, 2001, each of which is incorporated in its entirety herein by reference).

x. tRNA Sequences

[0255] In some embodiments, a construct of the present disclosure comprises a tRNA sequence. For instance, in some embodiments, a tRNA sequence may be used to facilitate a multiplex gRNA or shRNA/siRNA strategy. For example, in some embodiments, a tRNA may be included in a construct comprising at least 2, 3, 4, 5, 6, 7, 8, 9, 10 gRNAs; at least 2, 3, 4, 5, 6, 7, 8, 9, 10 shRNA/siRNAs etc. (see, e.g., PNAS 2015, 112 (11) 3570-3575, which is incorporated in its entirety herein by reference).

xi. Other Intronic Sequences

[0256] In some embodiments a construct of the present disclosure includes one or more intronic sequences, which intronic sequences do not comprise a UTR sequence. In some embodiments, non-UTR sequences may be incorporated into 5′ or 3′ UTRs. In some embodiments, introns or portions of intron sequences may be incorporated into t flanking regions of a polynucleotide in any constructs, compositions, kits, and methods provided herein. Incorporation of intronic sequences may increase protein production as well as mRNA levels. An intron can be an intron from a KCNQ4 gene or can be an intron from a heterologous gene, e.g., a hybrid adenovirus/mouse immunoglobulin intron (Yew et al., Human Gene Ter. 8(5):575-584, 1997, which is incorporated in its entirety herein by reference), an SV40 intron (Ostedgaard et al., Proc. Natl. Acad. Sci. U.S.A. 102(8):2952-2957, 2005, which is incorporated in its entirety herein by reference), an MVM intron (Wu et al., Mol. Ther. 16(2):280-289, 2008, which is incorporated in its entirety herein by reference), a factor IX truncated intron 1 (Wu et al., Mol. Ther. 16(2):280-289, 2008; Kurachi et al., J. Biol. Chem. 270(10):5276-5281, 1995, each of which is incorporated in its entirety herein by reference), a chimeric J-globulin splice donor/immunoglobulin heavy chain splice acceptor intron (Wu et al., Mol. Ther. 16(2):280-289, 2008; Choi et al., Mol. Brain 7:17, 2014, each of which is incorporated in its entirety herein by reference), SV40 late splice donor/splice acceptor intron (19S/16S) (Yew et al., Human Gene Ther. 8(5):575-584, 1997, which is incorporated in its entirety herein by reference), hybrid adenovirus spice donor/IgG splice acceptor (Choi et al., Mol. Brain 7:17, 1991; Huang and Gorman, Mol. Cell Biol. 10(4):1805-1810, 1990, each of which is incorporated in its entirety herein by reference). In some embodiments, an intronic sequence is at least 85%, 90%, 95%, 98% or 99% identical to any intronic sequence disclosed herein.

[0257] By way of non-limiting example, an intronic sequence in accordance with the present disclosure may be or comprise a sequence according to SEQ ID NOs. 31-32.

xii. Polyadenylation Sequences

[0258] In some embodiments, a construct of the present disclosure may comprise at least one poly(A) sequence. Most nascent eukaryotic mRNA possesses a poly(A) tail at its 3′ end which is added during a complex process that includes cleavage of a primary transcript and a coupled polyadenylation reaction (see, e.g., Proudfoot et al., Cell 108:501-512, 2002). A poly(A) tail confers mRNA stability and transferability (see, e.g., Molecular Biology of the Cell, Third Edition by B. Alberts et al., Garland Publishing, 1994). In some embodiments, a poly(A) sequence is positioned 3′ to a nucleic acid sequence encoding a KCNQ4 gene product or inhibitory nucleic acid molecule.

[0259] In some embodiments, polyadenylation refers to a covalent linkage of a polyadenylyl moiety, or its modified variant, to a messenger RNA molecule. In eukaryotic organisms, most messenger RNA (mRNA) molecules are polyadenylated at a 3′ end. In some embodiments, a 3′ poly(A) tail is a long sequence of adenine nucleotides (often several hundred) added to pre-mRNA through enzymatic action, polyadenylate polymerase. In higher eukaryotes, a poly(A) tail is added onto transcripts that contain a specific sequence, a polyadenylation signal. In some embodiments, a poly(A) tail and a protein bound to it aid in protecting mRNA from degradation by exonucleases. As will be understood to those of skill in the art, polyadenylation is also important for transcription termination, export of mRNA from a cell's nucleus, and translation. Polyadenylation occurs in a cell nucleus immediately after transcription of DNA into RNA, but additionally can also occur later in the cytoplasm. After transcription has been terminated, an mRNA chain is cleaved through action of an endonuclease complex associated with RNA polymerase. A cleavage site is usually characterized by the presence of a base sequence AAUAAA near a given cleavage site. After an mRNA has been cleaved, adenosine residues are added to the free 3′ end at the cleavage site.

[0260] In some embodiments, a poly(A) signal sequence is a sequence that triggers endonuclease cleavage of an mRNA and addition of a series of adenosines to the 3′ end of a cleaved mRNA. A “poly(A)” portion refers to a series of adenosines attached by polyadenylation to an mRNA. In some embodiments of for the present disclosure, such as, e.g., transient expression, a polyA is between 50 and 5000 (SEQ ID NO: 93), preferably greater than 64, more preferably greater than 100, most preferably greater than 300 or 400. Poly(A) sequences can be modified chemically or enzymatically to modulate mRNA functionality such as localization, stability or efficiency of translation.

[0261] There are several poly(A) signal sequences that can be used, including those derived from bovine growth hormone (bgh) (Woychik et al., Proc. Natl. Acad. Sci. U.S.A. 81(13):3944-3948, 1984; U.S. Pat. No. 5,122,458; Yew et al., Human Gene Ther. 8(5):575-584, 1997; Xu et al., Human Gene Ther. 12(5):563-573, 2001; Xu et al., Gene Ther. 8:1323-1332, 2001; Wu et al., Mol. Ther. 16(2):280-289, 2008; Gray et al., Human Gene Ther. 22:1143-1153, 2011; Choi et al., Mol. Brain 7:17, 2014, each of which is incorporated in its entirety herein by reference), mouse-β-globin, mouse-α-globin (Orkin et al., EMBO J. 4(2):453-456, 1985; Thein et al., Blood 71(2):313-319, 1988, each which is incorporated in its entirety herein by reference), human collagen, polyoma virus (Batt et al., Mol. Cell Biol. 15(9):4783-4790, 1995, each of which is incorporated in its entirety herein by reference), Herpes simplex virus thymidine kinase gene (HSV TK), IgG heavy-chain gene polyadenylation signal (US 2006/0040354, which is incorporated in its entirety herein by reference), human growth hormone (hGH) (Szymanski et al., Mol. Therapy 15(7):1340-1347, 2007; Ostegaard et al., Proc. Natl. Acad. Sci. U.S.A. 102(8):2952-2957, 2005, each of which is incorporated in its entirety herein by reference), synthetic polyA (Levitt et al., Genes Dev. 3(7):1019-1025, 1989; Yew et al., Human Gene Ther. 8(5):575-584, 1997; Ostegaard et al., Proc. Natl. Acad. Sci. U.S.A. 102(8):2952-2957, 2005; Choi et al., Mol. Brain 7:17, 2014, each of which is incorporated in its entirety herein by reference), HIV-1 upstream poly(A) enhancer (Schambach et al., Mol. Ther. 15(6):1167-1173, 2007, each of which is incorporated in its entirety herein by reference), adenovirus (L3) upstream poly(A) enhancer (Schambach et al., Mol. Ther. 15(6):1167-1173, 2007, which is incorporated in its entirety herein by reference), hTHGB upstream poly(A) enhancer (Schambach et al., Mol. Ther. 15(6):1167-1173, 2007), hC2 upstream poly(A) enhancer (Schambach et al., Mol. Ther. 15(6):1167-1173, 2007), the group consisting of SV40 poly(A) signal sequence, such as the SV40 late and early poly(A) signal sequence (Schek et al., Mol. Cell Biol. 12(12):5386-5393, 1992; Choi et al., Mol. Brain 7:17, 2014; Schambach et al., Mol. Ther. 15(6):1167-1173, 2007, each of which is incorporated in its entirety herein by reference). Non-limiting examples of poly(A) signal sequences include SEQ ID NOs: 33, 34, or 35.

[0262] In some embodiments, a poly(A) signal sequence can be the sequence AATAAA. In some embodiments, an AATAAA sequence may be substituted with other hexanucleotide sequences with homology to AATAAA which are capable of signaling polyadenylation, including ATTAAA, AGTAAA, CATAAA, TATAAA, GATAAA, ACTAAA, AATATA, AAGAAA, AATAAT, AAAAAA, AATGAA, AATCAA, AACAAA, AATCAA, AATAAC, AATAGA, AATTAA, or AATAAG (see, e.g., WO 06/12414, which is incorporated in its entirety herein by reference).

[0263] In some embodiments, a poly(A) signal sequence can be a synthetic polyadenylation site (see, e.g., the pCl-neo expression construct of Promega which is based on Levitt el al, Genes Dev. 3(7):1019-1025, 1989, which is incorporated in its entirety herein by reference). In some embodiments, a poly(A) signal sequence is a polyadenylation signal of soluble neuropilin-1 (sNRP) (SEQ ID NO: 94) (see, e.g., WO 05/073384, which is incorporated in its entirety herein by reference). In some embodiments, a poly(A) sequence is a bovine growth hormone poly(A) sequence. In some such embodiments, a bGH poly(A) sequence is or comprises SEQ ID NO: 36. In some embodiments, a construct or construct of the present disclosure comprises a bovine growth hormone polyA sequence represented by SEQ ID NO: 36. Additional examples of poly(A) signal sequences are known in the art.

[0264] In some embodiments, a polyA sequence is at least 85%, 90%, 95%, 98% or 99% identical to the polyA sequence of SEQ ID NOs: 33, 34, 35, or 36. In some embodiments, a polyadenylation sequence is at least 85%, 90%, 95%, 98% or 99% identical to any polyadenylation sequence disclosed herein.

[0265] By way of non-limiting example, a polyadenylation sequence may be or comprise a sequence according to SEQ ID NOs. 33-36.

xiii. Other Regulatory Sequences

[0266] In some embodiments, a construct of the present disclosure can include one or more additional regulatory elements, e.g., a woodchuck hepatitis virus posttranscriptional regulatory element (WPRE), e.g., SEQ ID NO: 37. In some embodiments, a WPRE sequence is at least 85%, 90%, 95%, 98% or 99% identical to the WPRE sequence represented by SEQ ID NO: 37. In some embodiments, a regulatory element impacts expression of, e.g., a coding sequence of a construct (e.g., a sequence encoding a KCNQ4 gene product). In some embodiments, a regulatory element is a WPRE. In some such embodiments, such a regulatory element enhances or strengthens expression of one or more elements of a construct (e.g., a KCNQ4 gene product). By way of non-limiting example, a regulatory sequence may be or comprise the following:

Xiv. Destabilization Domains

[0267] Any compositions (e.g., constructs) provided herein can optionally include a sequence that is or encodes a destabilization domain. In some embodiments, a destabilization domain is an amino acid sequence that decreases in vivo or in vitro half-life of a protein that includes a destabilization domain, e.g., as compared to the same protein lacking a stabilization domain. For example, in some embodiments, a destabilization domain may result in targeting of a protein that includes a destabilization domain for proteosomal degradation. Non-limiting examples of destabilization domains include a destabilizing domain of E. coli dihydrofolate reductase (DHFR) (Iwamoto et al. (2010) Chem. Biol. 17(9): 981-998, which is incorporated in its entirety herein by reference) and FK-506 binding protein (FKBP) (Wenlin et al. (2015) PLoS One 10(12): e0145783, which is incorporated in its entirety herein by reference). SEQ ID NO: 38 is an exemplary amino acid sequence of a DHFR destabilization domain. In some embodiments, a degradation sequence is at least 85%, 90%, 95%, 98% or 99% identical to the degradation sequence of SEQ ID NO: 38. Additional examples of destabilization domains are known in the art.

[0268] In some embodiments, any constructs provided herein can optionally include a degradation sequence, e.g., a CL1 degradation sequence of SEQ ID NO: 39. In some embodiments, a CL1 degradation sequence is at least 85%, 90%, 95%, 98% or 99% identical to the degradation sequence of SEQ ID NO: 39.

xv. Degron Domains

[0269] In some embodiments, any constructs provided herein can optionally include a C2H2 Zinc Finger “controllable” degron sequence and/or controllable destabilizing domain for a protein (e.g., a Cas9 protein). SEQ ID NO: 40 is an exemplary amino acid sequence of a C2H2 zinc finger degron domain.

xvi. Reporter Sequences or Elements

[0270] Any constructs provided herein can optionally include a sequence encoding a reporter protein (“a reporter sequence”). For example, in some embodiments, a reporter sequence may be a FLAG, an eGFP, an mScarlet, a luciferase or any variant thereof. In some embodiments, a reporter sequence is visibly detectable without intervention. In some embodiments, a reporter element may be detected using a combination of fluorescent, histochemical, and/or transcript or protein analyses. Non-limiting examples of reporter sequences are described herein. Additional examples of reporter sequences are known in the art. In some embodiments, reporter sequence can be used to verify tissue-specific targeting capabilities and tissue-specific promoter regulatory activity of any constructs described herein.

[0271] In some embodiments, a reporter sequence is a FLAG tag (e.g., a 3×FLAG tag). In some embodiments, constructs or constructs of the present disclosure may comprise a 3×FLAG sequence. In some embodiments, presence of a reporter (e.g., of a construct carrying a FLAG tag in a mammalian cell (e.g., an inner ear cell, e.g., a cochlear hair or supporting cell) is detected by protein binding or detection assays (e.g., Western blots, immunohistochemistry, radioimmunoassay (RIA), mass spectrometry). An exemplary 3×FLAG tag sequence is provided as SEQ ID NO: 41.

xvii. Additional Sequences

[0272] In some embodiments, constructs or constructs of the present disclosure may comprise a T2A element or sequence. In some embodiments, constructs of the present disclosure may include one or more cloning sites. In some such embodiments, cloning sites may not be fully removed prior to manufacturing for administration to a subject.

xviii. Single Construct Systems

[0273] In some embodiments, the present disclosure provides compositions which may include a single construct system. In some such embodiments, a single construct may deliver an inhibitory nucleic acid and/or a nucleic acid that encodes a functional (e.g., wild-type or otherwise functional, e.g., codon optimized) copy of KCNQ4. In some embodiments, a construct system is or comprises an AAV construct. In some embodiments described herein, a single AAV construct is capable of expressing a full-length KCNQ4 messenger RNA in a target cell. In some embodiments of any methods described herein, a single construct (e.g., any constructs described herein) that includes a sequence encoding a functional KCNQ4 protein (e.g., any construct that generates functional KCNQ4 protein) can be administered to a subject.

xix. Multiple Construct Systems

[0274] In some embodiments, a construct system of the present disclosure may comprise more than one construct (e.g., a dual or triple construct, e.g., for delivery of various components of a system provided by the present disclosure (e.g., a gene editing system and a transgene expression system). For example, in some embodiments, a dual construct may include two separate AAV constructs, each comprising a different component or construct (e.g., a CRISPR/Cas9 component and a replacement KCNQ4 component). In some embodiments, one construct (e.g., a first AAV construct) may comprise an inhibitory nucleic acid (e.g., an siRNA, a microRNA) and a second construct (e.g., a second AAV construct) may comprise a sequence encoding a functional KCNQ4 (e.g., a wild-type KCNQ4, e.g., a codon-optimized KCNQ4). In some embodiments, a dual AAV construct may include two separate AAV constructs, each including different or the same regulatory regions or promoters. In some embodiments, each construct comprises regulatory elements and promoters specific to a target, e.g., an ear cell, e.g., a hair cell, e.g., an outer hair cell.

[0275] In some embodiments, the present disclosure provides technologies that comprise multiple constructs. In some such embodiments, constructs may be all of a single construct type (e.g., AAV), or more than one type (e.g., AAV, adeno, etc.). In some such embodiments that comprise multiple constructs, each construct comprises a component of a system provided by the present disclosure, e.g., one construct comprises an inhibitory nucleic acid (e.g., a KCNQ4 miRNA) and another construct comprises a sequence encoding a functional KCNQ4 (e.g., a wild-type KCNQ4 gene that encodes a functional Kv7.4 protein, e.g., a codon-optimized KCNQ4 gene that encodes a functional Kv7.4 protein, etc.).

[0276] In some embodiments comprising multiple AAV constructs, AAV constructs may be of the same or different types, e.g., the same or different serotype.

[0277] In some embodiments, the present disclosure provides compositions comprising one or more constructs to deliver a therapeutic gene product or portion thereof to a subject in need thereof. For example, in some embodiments, a KCNQ4 gene is changed (e.g., via substitution, deletion, addition) in a genome of a subject. In some such embodiments, one or more constructs may be administered to a subject. In some such embodiments, one or more constructs may be administered to either (i) knockdown a variant (e.g., with a substitution, addition, or deletion) or nonfunctional (e.g., loss-of-function) KCNQ4 and/or (ii) provide a functional KCNQ4.

xx. Exemplary Constructs

[0278] In some embodiments, the present disclosure provides technologies (e.g., compositions, systems, particles, comprising AAV-based constructs. In some embodiments, such technologies comprise a single construct. In some embodiments, such technologies comprise multiple constructs. In some embodiments, the present disclosure provides compositions or systems comprising multiple AAV particles each comprised of a single construct. In some embodiments, a single construct may deliver a polynucleotide that encodes a functional (e.g., wild type or otherwise functional, e.g., codon optimized) copy of a KCNQ4 gene. In some embodiments, a construct is or comprises an rAAV construct. In some embodiments described herein, a single rAAV construct is capable of expressing a full-length KCNQ4 messenger RNA or a characteristic protein thereof in a target cell (e.g., an inner ear cell). In some embodiments, a single construct (e.g., any of the constructs described herein) can include a sequence encoding a functional KCNQ4 protein (e.g., any construct that generates functional KCNQ4 protein). In some embodiments, a single construct (e.g., any of the constructs described herein) can include a sequence encoding a functional KCNQ4 protein (e.g., any construct that generates functional KCNQ4 protein) and optionally additional polypeptide sequences (e.g., regulatory sequences, and/or reporter sequences). In some embodiments, a single construct may deliver a polynucleotide that encodes a functional Cas9 protein. In some embodiments, a single construct may deliver a polynucleotide that encodes catalytically dead Cas9 protein. In some embodiments, a single construct may deliver a polynucleotide that encodes any number of miRNA, siRNA, shRNA, sgRNA, and/or associated regulatory regions.

[0279] In some embodiments, a single construct composition or system may comprise any or all of the exemplary construct components described herein. In some embodiments, an exemplary single construct is represented by SEQ ID NO: 172-291. In some embodiments, an exemplary single construct is at least 85%, 90%, 95%, 98% or 99% identical to the sequences represented by SEQ ID NO: 172-291. One skilled in the art would recognize that constructs may undergo additional modifications including codon-optimization, introduction of novel but functionally equivalent (e.g., silent mutations), addition of reporter sequences, and/or other routine modification.

### Exemplary Construct Embodiments

miRNA Construct Sequences

[0280] In one embodiment, an exemplary construct comprises: a 5′ ITR exemplified by SEQ ID NO: 19, optionally a cloning site exemplified by SEQ ID NO: 155, a CMV enhancer exemplified by SEQ ID NO: 22, a CBA promoter exemplified by SEQ ID NO: 101, a chimeric intron exemplified by SEQ ID NO: 102 with a microRNA backbone and KCNQ4 targeting sequence exemplified by SEQ ID NO: 104 engineered into the chimeric intron, optionally a cloning site exemplified by SEQ ID NO: 156, an eGFP coding region exemplified by SEQ ID NO: 103, optionally a cloning site exemplified by SEQ ID NO: 157, a microRNA backbone and KCNQ4 targeting sequence exemplified by SEQ ID NO: 104, optionally a cloning site exemplified by SEQ ID NO: 158, a polyA site exemplified by SEQ ID NO: 36, optionally a cloning site exemplified by SEQ ID NO: 159, and a 3′ ITR exemplified by SEQ ID NO: 20.

[0281] In one embodiment, an exemplary construct comprises: a 5′ ITR exemplified by SEQ ID NO: 19, optionally a cloning site exemplified by SEQ ID NO: 155, a CMV enhancer exemplified by SEQ ID NO: 22, a CBA promoter exemplified by SEQ ID NO: 101, a chimeric intron exemplified by SEQ ID NO: 102 with a microRNA backbone and KCNQ4 targeting sequence exemplified by SEQ ID NO: 105 engineered into the chimeric intron, optionally a cloning site exemplified by SEQ ID NO: 156, an eGFP coding region exemplified by SEQ ID NO: 103, optionally a cloning site exemplified by SEQ ID NO: 157, a microRNA backbone and KCNQ4 targeting sequence exemplified by SEQ ID NO: 105, optionally a cloning site exemplified by SEQ ID NO: 158, a polyA site exemplified by SEQ ID NO: 36, optionally a cloning site exemplified by SEQ ID NO: 159, and a 3′ ITR exemplified by SEQ ID NO: 20.

[0282] In one embodiment, an exemplary construct comprises: a 5′ ITR exemplified by SEQ ID NO: 19, optionally a cloning site exemplified by SEQ ID NO: 155, a CMV enhancer exemplified by SEQ ID NO: 22, a CBA promoter exemplified by SEQ ID NO: 101, a chimeric intron exemplified by SEQ ID NO: 102 with a microRNA backbone and KCNQ4 targeting sequence exemplified by SEQ ID NO: 106 engineered into the chimeric intron, optionally a cloning site exemplified by SEQ ID NO: 156, an eGFP coding region exemplified by SEQ ID NO: 103, optionally a cloning site exemplified by SEQ ID NO: 157, a microRNA backbone and KCNQ4 targeting sequence exemplified by SEQ ID NO: 106, optionally a cloning site exemplified by SEQ ID NO: 158, a polyA site exemplified by SEQ ID NO: 36, optionally a cloning site exemplified by SEQ ID NO: 159, and a 3′ ITR exemplified by SEQ ID NO: 20.

[0283] In one embodiment, an exemplary construct comprises: a 5′ ITR exemplified by SEQ ID NO: 19, optionally a cloning site exemplified by SEQ ID NO: 155, a CMV enhancer exemplified by SEQ ID NO: 22, a CBA promoter exemplified by SEQ ID NO: 101, a chimeric intron exemplified by SEQ ID NO: 102 with a microRNA backbone and KCNQ4 targeting sequence exemplified by SEQ ID NO: 104 engineered into the chimeric intron, optionally a cloning site exemplified by SEQ ID NO: 156, an eGFP coding region exemplified by SEQ ID NO: 103, optionally a cloning site exemplified by SEQ ID NO: 157, a microRNA backbone and KCNQ4 targeting sequence exemplified by SEQ ID NO: 107, optionally a cloning site exemplified by SEQ ID NO: 158, a polyA site exemplified by SEQ ID NO: 36, optionally a cloning site exemplified by SEQ ID NO: 159, and a 3′ ITR exemplified by SEQ ID NO: 20.

[0284] In one embodiment, an exemplary construct comprises: a 5′ ITR exemplified by SEQ ID NO: 19, optionally a cloning site exemplified by SEQ ID NO: 155, a CMV enhancer exemplified by SEQ ID NO: 22, a CBA promoter exemplified by SEQ ID NO: 101, a chimeric intron exemplified by SEQ ID NO: 102 with a microRNA backbone and KCNQ4 targeting sequence exemplified by SEQ ID NO: 105 engineered into the chimeric intron, optionally a cloning site exemplified by SEQ ID NO: 156, an eGFP coding region exemplified by SEQ ID NO: 103, optionally a cloning site exemplified by SEQ ID NO: 157, a microRNA backbone and KCNQ4 targeting sequence exemplified by SEQ ID NO: 108, optionally a cloning site exemplified by SEQ ID NO: 158, a polyA site exemplified by SEQ ID NO: 36, optionally a cloning site exemplified by SEQ ID NO: 159, and a 3′ ITR exemplified by SEQ ID NO: 20.

[0285] In one embodiment, an exemplary construct comprises: a 5′ ITR exemplified by SEQ ID NO: 19, optionally a cloning site exemplified by SEQ ID NO: 155, a CMV enhancer exemplified by SEQ ID NO: 22, a CBA promoter exemplified by SEQ ID NO: 101, a chimeric intron exemplified by SEQ ID NO: 106 with a microRNA backbone and KCNQ4 targeting sequence exemplified by SEQ ID NO: 104 engineered into the chimeric intron, optionally a cloning site exemplified by SEQ ID NO: 156, an eGFP coding region exemplified by SEQ ID NO: 103, optionally a cloning site exemplified by SEQ ID NO: 157, a microRNA backbone and KCNQ4 targeting sequence exemplified by SEQ ID NO: 109, optionally a cloning site exemplified by SEQ ID NO: 158, a polyA site exemplified by SEQ ID NO: 36, optionally a cloning site exemplified by SEQ ID NO: 159, and a 3′ ITR exemplified by SEQ ID NO: 20.

[0286] In one embodiment, an exemplary construct comprises: a 5′ ITR exemplified by SEQ ID NO: 19, optionally a cloning site exemplified by SEQ ID NO: 155, a CMV enhancer exemplified by SEQ ID NO: 22, a CBA promoter exemplified by SEQ ID NO: 101, a chimeric intron exemplified by SEQ ID NO: 102 with a microRNA backbone and KCNQ4 targeting sequence exemplified by SEQ ID NO: 104 engineered into the chimeric intron, optionally a cloning site exemplified by SEQ ID NO: 156, an eGFP coding region exemplified by SEQ ID NO: 103, optionally a cloning site exemplified by SEQ ID NO: 157, a microRNA backbone and KCNQ4 targeting sequence exemplified by SEQ ID NO: 110, optionally a cloning site exemplified by SEQ ID NO: 158, a polyA site exemplified by SEQ ID NO: 36, optionally a cloning site exemplified by SEQ ID NO: 159, and a 3′ ITR exemplified by SEQ ID NO: 20.

[0287] In one embodiment, an exemplary construct comprises: a 5′ ITR exemplified by SEQ ID NO: 19, optionally a cloning site exemplified by SEQ ID NO: 155, a CMV enhancer exemplified by SEQ ID NO: 22, a CBA promoter exemplified by SEQ ID NO: 101, a chimeric intron exemplified by SEQ ID NO: 102 with a microRNA backbone and KCNQ4 targeting sequence exemplified by SEQ ID NO: 105 engineered into the chimeric intron, optionally a cloning site exemplified by SEQ ID NO: 156, an eGFP coding region exemplified by SEQ ID NO: 103, optionally a cloning site exemplified by SEQ ID NO: 157, a microRNA backbone and KCNQ4 targeting sequence exemplified by SEQ ID NO: 111, optionally a cloning site exemplified by SEQ ID NO: 158, a polyA site exemplified by SEQ ID NO: 36, optionally a cloning site exemplified by SEQ ID NO: 159, and a 3′ ITR exemplified by SEQ ID NO: 20.

[0288] In one embodiment, an exemplary construct comprises: a 5′ ITR exemplified by SEQ ID NO: 19, optionally a cloning site exemplified by SEQ ID NO: 155, a CMV enhancer exemplified by SEQ ID NO: 22, a CBA promoter exemplified by SEQ ID NO: 101, a chimeric intron exemplified by SEQ ID NO: 102 with a microRNA backbone and KCNQ4 targeting sequence exemplified by SEQ ID NO: 106 engineered into the chimeric intron, optionally a cloning site exemplified by SEQ ID NO: 156, an eGFP coding region exemplified by SEQ ID NO: 103, optionally a cloning site exemplified by SEQ ID NO: 157, a microRNA backbone and KCNQ4 targeting sequence exemplified by SEQ ID NO: 112, optionally a cloning site exemplified by SEQ ID NO: 158, a polyA site exemplified by SEQ ID NO: 36, optionally a cloning site exemplified by SEQ ID NO: 159, and a 3′ ITR exemplified by SEQ ID NO: 20.

[0289] In one embodiment, an exemplary construct comprises: a 5′ ITR exemplified by SEQ ID NO: 19, optionally a cloning site exemplified by SEQ ID NO: 155, a CMV enhancer exemplified by SEQ ID NO: 22, a CBA promoter exemplified by SEQ ID NO: 101, a chimeric intron exemplified by SEQ ID NO: 102 with a microRNA backbone and KCNQ4 targeting sequence exemplified by SEQ ID NO: 104 engineered into the chimeric intron, optionally a cloning site exemplified by SEQ ID NO: 156, an eGFP coding region exemplified by SEQ ID NO: 103, optionally a cloning site exemplified by SEQ ID NO: 157, a microRNA backbone and KCNQ4 targeting sequence exemplified by SEQ ID NO: 113, optionally a cloning site exemplified by SEQ ID NO: 158, a polyA site exemplified by SEQ ID NO: 36, optionally a cloning site exemplified by SEQ ID NO: 159, and a 3′ ITR exemplified by SEQ ID NO: 20.

[0290] In one embodiment, an exemplary construct comprises: a 5′ ITR exemplified by SEQ ID NO: 19, optionally a cloning site exemplified by SEQ ID NO: 155, a CMV enhancer exemplified by SEQ ID NO: 22, a CBA promoter exemplified by SEQ ID NO: 101, a chimeric intron exemplified by SEQ ID NO: 102 with a microRNA backbone and KCNQ4 targeting sequence exemplified by SEQ ID NO: 105 engineered into the chimeric intron, optionally a cloning site exemplified by SEQ ID NO: 156, an eGFP coding region exemplified by SEQ ID NO: 103, optionally a cloning site exemplified by SEQ ID NO: 157, a microRNA backbone and KCNQ4 targeting sequence exemplified by SEQ ID NO: 114, optionally a cloning site exemplified by SEQ ID NO: 158, a polyA site exemplified by SEQ ID NO: 36, optionally a cloning site exemplified by SEQ ID NO: 159, and a 3′ ITR exemplified by SEQ ID NO: 20.

[0291] In one embodiment, an exemplary construct comprises: a 5′ ITR exemplified by SEQ ID NO: 19, optionally a cloning site exemplified by SEQ ID NO: 155, a CMV enhancer exemplified by SEQ ID NO: 22, a CBA promoter exemplified by SEQ ID NO: 101, a chimeric intron exemplified by SEQ ID NO: 102 with a microRNA backbone and KCNQ4 targeting sequence exemplified by SEQ ID NO: 106 engineered into the chimeric intron, optionally a cloning site exemplified by SEQ ID NO: 156, an eGFP coding region exemplified by SEQ ID NO: 103, optionally a cloning site exemplified by SEQ ID NO: 157, a microRNA backbone and KCNQ4 targeting sequence exemplified by SEQ ID NO: 115, optionally a cloning site exemplified by SEQ ID NO: 158, a polyA site exemplified by SEQ ID NO: 36, optionally a cloning site exemplified by SEQ ID NO: 159, and a 3′ ITR exemplified by SEQ ID NO: 20.

[0292] In one embodiment, an exemplary construct comprises: a 5′ ITR exemplified by SEQ ID NO: 19, optionally a cloning site exemplified by SEQ ID NO: 155, a CMV enhancer exemplified by SEQ ID NO: 22, a CBA promoter exemplified by SEQ ID NO: 101, a chimeric intron exemplified by SEQ ID NO: 102 with a microRNA backbone and KCNQ4 targeting sequence exemplified by SEQ ID NO: 107 engineered into the chimeric intron, optionally a cloning site exemplified by SEQ ID NO: 156, an eGFP coding region exemplified by SEQ ID NO: 103, optionally a cloning site exemplified by SEQ ID NO: 157, a microRNA backbone and KCNQ4 targeting sequence exemplified by SEQ ID NO: 107, optionally a cloning site exemplified by SEQ ID NO: 158, a polyA site exemplified by SEQ ID NO: 36, optionally a cloning site exemplified by SEQ ID NO: 159, and a 3′ ITR exemplified by SEQ ID NO: 20.

[0293] In one embodiment, an exemplary construct comprises: a 5′ ITR exemplified by SEQ ID NO: 19, optionally a cloning site exemplified by SEQ ID NO: 155, a CMV enhancer exemplified by SEQ ID NO: 22, a CBA promoter exemplified by SEQ ID NO: 101, a chimeric intron exemplified by SEQ ID NO: 102 with a microRNA backbone and KCNQ4 targeting sequence exemplified by SEQ ID NO: 108 engineered into the chimeric intron, optionally a cloning site exemplified by SEQ ID NO: 156, an eGFP coding region exemplified by SEQ ID NO: 103, optionally a cloning site exemplified by SEQ ID NO: 157, a microRNA backbone and KCNQ4 targeting sequence exemplified by SEQ ID NO: 108, optionally a cloning site exemplified by SEQ ID NO: 158, a polyA site exemplified by SEQ ID NO: 36, optionally a cloning site exemplified by SEQ ID NO: 159, and a 3′ ITR exemplified by SEQ ID NO: 20.

[0294] In one embodiment, an exemplary construct comprises: a 5′ ITR exemplified by SEQ ID NO: 19, optionally a cloning site exemplified by SEQ ID NO: 155, a CMV enhancer exemplified by SEQ ID NO: 22, a CBA promoter exemplified by SEQ ID NO: 101, a chimeric intron exemplified by SEQ ID NO: 102 with a microRNA backbone and KCNQ4 targeting sequence exemplified by SEQ ID NO: 109 engineered into the chimeric intron, optionally a cloning site exemplified by SEQ ID NO: 156, an eGFP coding region exemplified by SEQ ID NO: 103, optionally a cloning site exemplified by SEQ ID NO: 157, a microRNA backbone and KCNQ4 targeting sequence exemplified by SEQ ID NO: 109, optionally a cloning site exemplified by SEQ ID NO: 158, a polyA site exemplified by SEQ ID NO: 36, optionally a cloning site exemplified by SEQ ID NO: 159, and a 3′ ITR exemplified by SEQ ID NO: 20.

[0295] In one embodiment, an exemplary construct comprises: a 5′ ITR exemplified by SEQ ID NO: 19, optionally a cloning site exemplified by SEQ ID NO: 155, a CMV enhancer exemplified by SEQ ID NO: 22, a CBA promoter exemplified by SEQ ID NO: 101, a chimeric intron exemplified by SEQ ID NO: 102 with a microRNA backbone and KCNQ4 targeting sequence exemplified by SEQ ID NO: 107 engineered into the chimeric intron, optionally a cloning site exemplified by SEQ ID NO: 156, an eGFP coding region exemplified by SEQ ID NO: 103, optionally a cloning site exemplified by SEQ ID NO: 157, a microRNA backbone and KCNQ4 targeting sequence exemplified by SEQ ID NO: 110, optionally a cloning site exemplified by SEQ ID NO: 158, a polyA site exemplified by SEQ ID NO: 36, optionally a cloning site exemplified by SEQ ID NO: 159, and a 3′ ITR exemplified by SEQ ID NO: 20.

[0296] In one embodiment, an exemplary construct comprises: a 5′ ITR exemplified by SEQ ID NO: 19, optionally a cloning site exemplified by SEQ ID NO: 155, a CMV enhancer exemplified by SEQ ID NO: 22, a CBA promoter exemplified by SEQ ID NO: 101, a chimeric intron exemplified by SEQ ID NO: 102 with a microRNA backbone and KCNQ4 targeting sequence exemplified by SEQ ID NO: 108 engineered into the chimeric intron, optionally a cloning site exemplified by SEQ ID NO: 156, an eGFP coding region exemplified by SEQ ID NO: 103, optionally a cloning site exemplified by SEQ ID NO: 157, a microRNA backbone and KCNQ4 targeting sequence exemplified by SEQ ID NO: 111, optionally a cloning site exemplified by SEQ ID NO: 158, a polyA site exemplified by SEQ ID NO: 36, optionally a cloning site exemplified by SEQ ID NO: 159, and a 3′ ITR exemplified by SEQ ID NO: 20.

[0297] In one embodiment, an exemplary construct comprises: a 5′ ITR exemplified by SEQ ID NO: 19, optionally a cloning site exemplified by SEQ ID NO: 155, a CMV enhancer exemplified by SEQ ID NO: 22, a CBA promoter exemplified by SEQ ID NO: 101, a chimeric intron exemplified by SEQ ID NO: 102 with a microRNA backbone and KCNQ4 targeting sequence exemplified by SEQ ID NO: 109 engineered into the chimeric intron, optionally a cloning site exemplified by SEQ ID NO: 156, an eGFP coding region exemplified by SEQ ID NO: 103, optionally a cloning site exemplified by SEQ ID NO: 157, a microRNA backbone and KCNQ4 targeting sequence exemplified by SEQ ID NO: 112, optionally a cloning site exemplified by SEQ ID NO: 158, a polyA site exemplified by SEQ ID NO: 36, optionally a cloning site exemplified by SEQ ID NO: 159, and a 3′ ITR exemplified by SEQ ID NO: 20.

[0298] In one embodiment, an exemplary construct comprises: a 5′ ITR exemplified by SEQ ID NO: 19, optionally a cloning site exemplified by SEQ ID NO: 155, a CMV enhancer exemplified by SEQ ID NO: 22, a CBA promoter exemplified by SEQ ID NO: 101, a chimeric intron exemplified by SEQ ID NO: 102 with a microRNA backbone and KCNQ4 targeting sequence exemplified by SEQ ID NO: 107 engineered into the chimeric intron, optionally a cloning site exemplified by SEQ ID NO: 156, an eGFP coding region exemplified by SEQ ID NO: 103, optionally a cloning site exemplified by SEQ ID NO: 157, a microRNA backbone and KCNQ4 targeting sequence exemplified by SEQ ID NO: 113, optionally a cloning site exemplified by SEQ ID NO: 158, a polyA site exemplified by SEQ ID NO: 36, optionally a cloning site exemplified by SEQ ID NO: 159, and a 3′ ITR exemplified by SEQ ID NO: 20.

[0299] In one embodiment, an exemplary construct comprises: a 5′ ITR exemplified by SEQ ID NO: 19, optionally a cloning site exemplified by SEQ ID NO: 155, a CMV enhancer exemplified by SEQ ID NO: 22, a CBA promoter exemplified by SEQ ID NO: 101, a chimeric intron exemplified by SEQ ID NO: 102 with a microRNA backbone and KCNQ4 targeting sequence exemplified by SEQ ID NO: 108 engineered into the chimeric intron, optionally a cloning site exemplified by SEQ ID NO: 156, an eGFP coding region exemplified by SEQ ID NO: 103, optionally a cloning site exemplified by SEQ ID NO: 157, a microRNA backbone and KCNQ4 targeting sequence exemplified by SEQ ID NO: 114, optionally a cloning site exemplified by SEQ ID NO: 158, a polyA site exemplified by SEQ ID NO: 36, optionally a cloning site exemplified by SEQ ID NO: 159, and a 3′ ITR exemplified by SEQ ID NO: 20.

[0300] In one embodiment, an exemplary construct comprises: a 5′ ITR exemplified by SEQ ID NO: 19, optionally a cloning site exemplified by SEQ ID NO: 155, a CMV enhancer exemplified by SEQ ID NO: 22, a CBA promoter exemplified by SEQ ID NO: 101, a chimeric intron exemplified by SEQ ID NO: 102 with a microRNA backbone and KCNQ4 targeting sequence exemplified by SEQ ID NO: 109 engineered into the chimeric intron, optionally a cloning site exemplified by SEQ ID NO: 156, an eGFP coding region exemplified by SEQ ID NO: 103, optionally a cloning site exemplified by SEQ ID NO: 157, a microRNA backbone and KCNQ4 targeting sequence exemplified by SEQ ID NO: 114, optionally a cloning site exemplified by SEQ ID NO: 158, a polyA site exemplified by SEQ ID NO: 36, optionally a cloning site exemplified by SEQ ID NO: 159, and a 3′ ITR exemplified by SEQ ID NO: 20.

[0301] In one embodiment, an exemplary construct comprises: a 5′ ITR exemplified by SEQ ID NO: 19, optionally a cloning site exemplified by SEQ ID NO: 155, a CMV enhancer exemplified by SEQ ID NO: 22, a CBA promoter exemplified by SEQ ID NO: 101, a chimeric intron exemplified by SEQ ID NO: 102 with a microRNA backbone and KCNQ4 targeting sequence exemplified by SEQ ID NO: 110 engineered into the chimeric intron, optionally a cloning site exemplified by SEQ ID NO: 156, an eGFP coding region exemplified by SEQ ID NO: 103, optionally a cloning site exemplified by SEQ ID NO: 157, a microRNA backbone and KCNQ4 targeting sequence exemplified by SEQ ID NO: 110, optionally a cloning site exemplified by SEQ ID NO: 158, a polyA site exemplified by SEQ ID NO: 36, optionally a cloning site exemplified by SEQ ID NO: 159, and a 3′ ITR exemplified by SEQ ID NO: 20.

[0302] In one embodiment, an exemplary construct comprises: a 5′ ITR exemplified by SEQ ID NO: 19, optionally a cloning site exemplified by SEQ ID NO: 155, a CMV enhancer exemplified by SEQ ID NO: 22, a CBA promoter exemplified by SEQ ID NO: 101, a chimeric intron exemplified by SEQ ID NO: 102 with a microRNA backbone and KCNQ4 targeting sequence exemplified by SEQ ID NO: 111 engineered into the chimeric intron, optionally a cloning site exemplified by SEQ ID NO: 156, an eGFP coding region exemplified by SEQ ID NO: 103, optionally a cloning site exemplified by SEQ ID NO: 157, a microRNA backbone and KCNQ4 targeting sequence exemplified by SEQ ID NO: 111, optionally a cloning site exemplified by SEQ ID NO: 158, a polyA site exemplified by SEQ ID NO: 36, optionally a cloning site exemplified by SEQ ID NO: 159, and a 3′ ITR exemplified by SEQ ID NO: 20.

[0303] In one embodiment, an exemplary construct comprises: a 5′ ITR exemplified by SEQ ID NO: 19, optionally a cloning site exemplified by SEQ ID NO: 155, a CMV enhancer exemplified by SEQ ID NO: 22, a CBA promoter exemplified by SEQ ID NO: 101, a chimeric intron exemplified by SEQ ID NO: 102 with a microRNA backbone and KCNQ4 targeting sequence exemplified by SEQ ID NO: 112 engineered into the chimeric intron, optionally a cloning site exemplified by SEQ ID NO: 156, an eGFP coding region exemplified by SEQ ID NO: 103, optionally a cloning site exemplified by SEQ ID NO: 157, a microRNA backbone and KCNQ4 targeting sequence exemplified by SEQ ID NO: 112, optionally a cloning site exemplified by SEQ ID NO: 158, a polyA site exemplified by SEQ ID NO: 36, optionally a cloning site exemplified by SEQ ID NO: 159, and a 3′ ITR exemplified by SEQ ID NO: 20.

[0304] In one embodiment, an exemplary construct comprises: a 5′ ITR exemplified by SEQ ID NO: 19, optionally a cloning site exemplified by SEQ ID NO: 155, a CMV enhancer exemplified by SEQ ID NO: 22, a CBA promoter exemplified by SEQ ID NO: 101, a chimeric intron exemplified by SEQ ID NO: 102 with a microRNA backbone and KCNQ4 targeting sequence exemplified by SEQ ID NO: 110 engineered into the chimeric intron, optionally a cloning site exemplified by SEQ ID NO: 156, an eGFP coding region exemplified by SEQ ID NO: 103, optionally a cloning site exemplified by SEQ ID NO: 157, a microRNA backbone and KCNQ4 targeting sequence exemplified by SEQ ID NO: 113, optionally a cloning site exemplified by SEQ ID NO: 158, a polyA site exemplified by SEQ ID NO: 36, optionally a cloning site exemplified by SEQ ID NO: 159, and a 3′ ITR exemplified by SEQ ID NO: 20.

[0305] In one embodiment, an exemplary construct comprises: a 5′ ITR exemplified by SEQ ID NO: 19, optionally a cloning site exemplified by SEQ ID NO: 155, a CMV enhancer exemplified by SEQ ID NO: 22, a CBA promoter exemplified by SEQ ID NO: 101, a chimeric intron exemplified by SEQ ID NO: 102 with a microRNA backbone and KCNQ4 targeting sequence exemplified by SEQ ID NO: 111 engineered into the chimeric intron, optionally a cloning site exemplified by SEQ ID NO: 156, an eGFP coding region exemplified by SEQ ID NO: 103, optionally a cloning site exemplified by SEQ ID NO: 157, a microRNA backbone and KCNQ4 targeting sequence exemplified by SEQ ID NO: 114, optionally a cloning site exemplified by SEQ ID NO: 158, a polyA site exemplified by SEQ ID NO: 36, optionally a cloning site exemplified by SEQ ID NO: 159, and a 3′ ITR exemplified by SEQ ID NO: 20.

[0306] In one embodiment, an exemplary construct comprises: a 5′ ITR exemplified by SEQ ID NO: 19, optionally a cloning site exemplified by SEQ ID NO: 155, a CMV enhancer exemplified by SEQ ID NO: 22, a CBA promoter exemplified by SEQ ID NO: 101, a chimeric intron exemplified by SEQ ID NO: 102 with a microRNA backbone and KCNQ4 targeting sequence exemplified by SEQ ID NO: 112 engineered into the chimeric intron, optionally a cloning site exemplified by SEQ ID NO: 156, an eGFP coding region exemplified by SEQ ID NO: 103, optionally a cloning site exemplified by SEQ ID NO: 157, a microRNA backbone and KCNQ4 targeting sequence exemplified by SEQ ID NO: 115, optionally a cloning site exemplified by SEQ ID NO: 158, a polyA site exemplified by SEQ ID NO: 36, optionally a cloning site exemplified by SEQ ID NO: 159, and a 3′ ITR exemplified by SEQ ID NO: 20.

[0307] In one embodiment, an exemplary construct comprises: a 5′ ITR exemplified by SEQ ID NO: 19, optionally a cloning site exemplified by SEQ ID NO: 155, a CMV enhancer exemplified by SEQ ID NO: 22, a CBA promoter exemplified by SEQ ID NO: 101, a chimeric intron exemplified by SEQ ID NO: 102 with a microRNA backbone and KCNQ4 targeting sequence exemplified by SEQ ID NO: 113 engineered into the chimeric intron, optionally a cloning site exemplified by SEQ ID NO: 156, an eGFP coding region exemplified by SEQ ID NO: 103, optionally a cloning site exemplified by SEQ ID NO: 157, a microRNA backbone and KCNQ4 targeting sequence exemplified by SEQ ID NO: 113, optionally a cloning site exemplified by SEQ ID NO: 158, a polyA site exemplified by SEQ ID NO: 36, optionally a cloning site exemplified by SEQ ID NO: 159, and a 3′ ITR exemplified by SEQ ID NO: 20.

[0308] In one embodiment, an exemplary construct comprises: a 5′ ITR exemplified by SEQ ID NO: 19, optionally a cloning site exemplified by SEQ ID NO: 155, a CMV enhancer exemplified by SEQ ID NO: 22, a CBA promoter exemplified by SEQ ID NO: 101, a chimeric intron exemplified by SEQ ID NO: 102 with a microRNA backbone and KCNQ4 targeting sequence exemplified by SEQ ID NO: 114 engineered into the chimeric intron, optionally a cloning site exemplified by SEQ ID NO: 156, an eGFP coding region exemplified by SEQ ID NO: 103, optionally a cloning site exemplified by SEQ ID NO: 157, a microRNA backbone and KCNQ4 targeting sequence exemplified by SEQ ID NO: 114, optionally a cloning site exemplified by SEQ ID NO: 158, a polyA site exemplified by SEQ ID NO: 36, optionally a cloning site exemplified by SEQ ID NO: 159, and a 3′ ITR exemplified by SEQ ID NO: 20.

[0309] In one embodiment, an exemplary construct comprises: a 5′ ITR exemplified by SEQ ID NO: 19, optionally a cloning site exemplified by SEQ ID NO: 155, a CMV enhancer exemplified by SEQ ID NO: 22, a CBA promoter exemplified by SEQ ID NO: 101, a chimeric intron exemplified by SEQ ID NO: 102 with a microRNA backbone and KCNQ4 targeting sequence exemplified by SEQ ID NO: 115 engineered into the chimeric intron, optionally a cloning site exemplified by SEQ ID NO: 156, an eGFP coding region exemplified by SEQ ID NO: 103, optionally a cloning site exemplified by SEQ ID NO: 157, a microRNA backbone and KCNQ4 targeting sequence exemplified by SEQ ID NO: 115, optionally a cloning site exemplified by SEQ ID NO: 158, a polyA site exemplified by SEQ ID NO: 36, optionally a cloning site exemplified by SEQ ID NO: 159, and a 3′ ITR exemplified by SEQ ID NO: 20.

miRNA Construct Sequences and Background NNNNN Sequences

[0310] In one embodiment, an exemplary construct comprises: a 5′ ITR exemplified by SEQ ID NO: 19, optionally a cloning site exemplified by SEQ ID NO: 155, a CMV enhancer exemplified by SEQ ID NO: 22, a CBA promoter exemplified by SEQ ID NO: 101, a chimeric intron exemplified by SEQ ID NO: 102 with a microRNA backbone and KCNQ4 targeting sequence exemplified by SEQ ID NO: 116 engineered into the chimeric intron, optionally a cloning site exemplified by SEQ ID NO: 156, an eGFP coding region exemplified by SEQ ID NO: 103, optionally a cloning site exemplified by SEQ ID NO: 157, a microRNA backbone and KCNQ4 targeting sequence exemplified by SEQ ID NO: 116, optionally a cloning site exemplified by SEQ ID NO: 158, a polyA site exemplified by SEQ ID NO: 36, optionally a cloning site exemplified by SEQ ID NO: 159, and a 3′ ITR exemplified by SEQ ID NO: 20.

[0311] In one embodiment, an exemplary construct comprises: a 5′ ITR exemplified by SEQ ID NO: 19, optionally a cloning site exemplified by SEQ ID NO: 155, a CMV enhancer exemplified by SEQ ID NO: 22, a CBA promoter exemplified by SEQ ID NO: 101, a chimeric intron exemplified by SEQ ID NO: 102 with a microRNA backbone and KCNQ4 targeting sequence exemplified by SEQ ID NO: 116 engineered into the chimeric intron, optionally a cloning site exemplified by SEQ ID NO: 156, an eGFP coding region exemplified by SEQ ID NO: 103, optionally a cloning site exemplified by SEQ ID NO: 158, a polyA site exemplified by SEQ ID NO: 36, optionally a cloning site exemplified by SEQ ID NO: 159, and a 3′ ITR exemplified by SEQ ID NO: 20.

[0312] In one embodiment, an exemplary construct comprises: a 5′ ITR exemplified by SEQ ID NO: 19, optionally a cloning site exemplified by SEQ ID NO: 155, a CMV enhancer exemplified by SEQ ID NO: 22, a CBA promoter exemplified by SEQ ID NO: 24, a chimeric intron exemplified by SEQ ID NO: 102, optionally a cloning site exemplified by SEQ ID NO: 156, an eGFP coding region exemplified by SEQ ID NO: 103, a microRNA backbone and KCNQ4 targeting sequence exemplified by SEQ ID NO: 134, optionally a cloning site exemplified by SEQ ID NO: 158, a polyA site exemplified by SEQ ID NO: 36, optionally a cloning site exemplified by SEQ ID NO: 159, and a 3′ ITR exemplified by SEQ ID NO: 20.

[0313] In one embodiment, an exemplary construct comprises: a 5′ ITR exemplified by SEQ ID NO: 19, optionally a cloning site exemplified by SEQ ID NO: 155, a CMV enhancer exemplified by SEQ ID NO: 22, a CBA promoter exemplified by SEQ ID NO: 101, a chimeric intron exemplified by SEQ ID NO: 102 with a microRNA backbone and KCNQ4 targeting sequence exemplified by SEQ ID NO: 117 engineered into the chimeric intron, optionally a cloning site exemplified by SEQ ID NO: 156, an eGFP coding region exemplified by SEQ ID NO: 103, optionally a cloning site exemplified by SEQ ID NO: 157, a microRNA backbone and KCNQ4 targeting sequence exemplified by SEQ ID NO: 117, optionally a cloning site exemplified by SEQ ID NO: 158, a polyA site exemplified by SEQ ID NO: 36, optionally a cloning site exemplified by SEQ ID NO: 159, and a 3′ ITR exemplified by SEQ ID NO: 20.

[0314] In one embodiment, an exemplary construct comprises: a 5′ ITR exemplified by SEQ ID NO: 19, optionally a cloning site exemplified by SEQ ID NO: 155, a CMV enhancer exemplified by SEQ ID NO: 22, a CBA promoter exemplified by SEQ ID NO: 101, a chimeric intron exemplified by SEQ ID NO: 102 with a microRNA backbone and KCNQ4 targeting sequence exemplified by SEQ ID NO: 118 engineered into the chimeric intron, optionally a cloning site exemplified by SEQ ID NO: 156, an eGFP coding region exemplified by SEQ ID NO: 103, optionally a cloning site exemplified by SEQ ID NO: 157, a microRNA backbone and KCNQ4 targeting sequence exemplified by SEQ ID NO: 118, optionally a cloning site exemplified by SEQ ID NO: 158, a polyA site exemplified by SEQ ID NO: 36, optionally a cloning site exemplified by SEQ ID NO: 159, and a 3′ ITR exemplified by SEQ ID NO: 20.

[0315] In one embodiment, an exemplary construct comprises: a 5′ ITR exemplified by SEQ ID NO: 19, optionally a cloning site exemplified by SEQ ID NO: 155, a CMV enhancer exemplified by SEQ ID NO: 22, a CBA promoter exemplified by SEQ ID NO: 101, a chimeric intron exemplified by SEQ ID NO: 102 with a microRNA backbone and KCNQ4 targeting sequence exemplified by SEQ ID NO: 119 engineered into the chimeric intron, optionally a cloning site exemplified by SEQ ID NO: 156, an eGFP coding region exemplified by SEQ ID NO: 103, optionally a cloning site exemplified by SEQ ID NO: 157, a microRNA backbone and KCNQ4 targeting sequence exemplified by SEQ ID NO: 119, optionally a cloning site exemplified by SEQ ID NO: 158, a polyA site exemplified by SEQ ID NO: 36, optionally a cloning site exemplified by SEQ ID NO: 159, and a 3′ ITR exemplified by SEQ ID NO: 20.

[0316] In one embodiment, an exemplary construct comprises: a 5′ ITR exemplified by SEQ ID NO: 19, optionally a cloning site exemplified by SEQ ID NO: 155, a CMV enhancer exemplified by SEQ ID NO: 22, a CBA promoter exemplified by SEQ ID NO: 101, a chimeric intron exemplified by SEQ ID NO: 102 with a microRNA backbone and KCNQ4 targeting sequence exemplified by SEQ ID NO: 120 engineered into the chimeric intron, optionally a cloning site exemplified by SEQ ID NO: 156, an eGFP coding region exemplified by SEQ ID NO: 103, optionally a cloning site exemplified by SEQ ID NO: 157, a microRNA backbone and KCNQ4 targeting sequence exemplified by SEQ ID NO: 120, optionally a cloning site exemplified by SEQ ID NO: 158, a polyA site exemplified by SEQ ID NO: 36, optionally a cloning site exemplified by SEQ ID NO: 159, and a 3′ ITR exemplified by SEQ ID NO: 20.

[0317] In one embodiment, an exemplary construct comprises: a 5′ ITR exemplified by SEQ ID NO: 19, optionally a cloning site exemplified by SEQ ID NO: 155, a CMV enhancer exemplified by SEQ ID NO: 22, a CBA promoter exemplified by SEQ ID NO: 101, a chimeric intron exemplified by SEQ ID NO: 102 with a microRNA backbone and KCNQ4 targeting sequence exemplified by SEQ ID NO: 121 engineered into the chimeric intron, optionally a cloning site exemplified by SEQ ID NO: 156, an eGFP coding region exemplified by SEQ ID NO: 103, optionally a cloning site exemplified by SEQ ID NO: 157, a microRNA backbone and KCNQ4 targeting sequence exemplified by SEQ ID NO: 121, optionally a cloning site exemplified by SEQ ID NO: 158, a polyA site exemplified by SEQ ID NO: 36, optionally a cloning site exemplified by SEQ ID NO: 159, and a 3′ ITR exemplified by SEQ ID NO: 20.

[0318] In one embodiment, an exemplary construct comprises: a 5′ ITR exemplified by SEQ ID NO: 19, optionally a cloning site exemplified by SEQ ID NO: 155, a CMV enhancer exemplified by SEQ ID NO: 22, a CBA promoter exemplified by SEQ ID NO: 101, a chimeric intron exemplified by SEQ ID NO: 102 with a microRNA backbone and KCNQ4 targeting sequence exemplified by SEQ ID NO: 122 engineered into the chimeric intron, optionally a cloning site exemplified by SEQ ID NO: 156, an eGFP coding region exemplified by SEQ ID NO: 103, optionally a cloning site exemplified by SEQ ID NO: 157, a microRNA backbone and KCNQ4 targeting sequence exemplified by SEQ ID NO: 122, optionally a cloning site exemplified by SEQ ID NO: 158, a polyA site exemplified by SEQ ID NO: 36, optionally a cloning site exemplified by SEQ ID NO: 159, and a 3′ ITR exemplified by SEQ ID NO: 20.

[0319] In one embodiment, an exemplary construct comprises: a 5′ ITR exemplified by SEQ ID NO: 19, optionally a cloning site exemplified by SEQ ID NO: 155, a CMV enhancer exemplified by SEQ ID NO: 22, a CBA promoter exemplified by SEQ ID NO: 101, a chimeric intron exemplified by SEQ ID NO: 102 with a microRNA backbone and KCNQ4 targeting sequence exemplified by SEQ ID NO: 123 engineered into the chimeric intron, optionally a cloning site exemplified by SEQ ID NO: 156, an eGFP coding region exemplified by SEQ ID NO: 103, optionally a cloning site exemplified by SEQ ID NO: 157, a microRNA backbone and KCNQ4 targeting sequence exemplified by SEQ ID NO: 123, optionally a cloning site exemplified by SEQ ID NO: 158, a polyA site exemplified by SEQ ID NO: 36, optionally a cloning site exemplified by SEQ ID NO: 159, and a 3′ ITR exemplified by SEQ ID NO: 20.

[0320] In one embodiment, an exemplary construct comprises: a 5′ ITR exemplified by SEQ ID NO: 19, optionally a cloning site exemplified by SEQ ID NO: 155, a CMV enhancer exemplified by SEQ ID NO: 22, a CBA promoter exemplified by SEQ ID NO: 101, a chimeric intron exemplified by SEQ ID NO: 102 with a microRNA backbone and KCNQ4 targeting sequence exemplified by SEQ ID NO: 124 engineered into the chimeric intron, optionally a cloning site exemplified by SEQ ID NO: 156, an eGFP coding region exemplified by SEQ ID NO: 103, optionally a cloning site exemplified by SEQ ID NO: 157, a microRNA backbone and KCNQ4 targeting sequence exemplified by SEQ ID NO: 124, optionally a cloning site exemplified by SEQ ID NO: 158, a polyA site exemplified by SEQ ID NO: 36, optionally a cloning site exemplified by SEQ ID NO: 159, and a 3′ ITR exemplified by SEQ ID NO: 20.

[0321] In one embodiment, an exemplary construct comprises: a 5′ ITR exemplified by SEQ ID NO: 19, optionally a cloning site exemplified by SEQ ID NO: 155, a CMV enhancer exemplified by SEQ ID NO: 22, a CBA promoter exemplified by SEQ ID NO: 101, a chimeric intron exemplified by SEQ ID NO: 102 with a microRNA backbone and KCNQ4 targeting sequence exemplified by SEQ ID NO: 125 engineered into the chimeric intron, optionally a cloning site exemplified by SEQ ID NO: 156, an eGFP coding region exemplified by SEQ ID NO: 103, optionally a cloning site exemplified by SEQ ID NO: 157, a microRNA backbone and KCNQ4 targeting sequence exemplified by SEQ ID NO: 125, optionally a cloning site exemplified by SEQ ID NO: 158, a polyA site exemplified by SEQ ID NO: 36, optionally a cloning site exemplified by SEQ ID NO: 159, and a 3′ ITR exemplified by SEQ ID NO: 20.

[0322] In one embodiment, an exemplary construct comprises: a 5′ ITR exemplified by SEQ ID NO: 19, optionally a cloning site exemplified by SEQ ID NO: 155, a CMV enhancer exemplified by SEQ ID NO: 22, a CBA promoter exemplified by SEQ ID NO: 101, a chimeric intron exemplified by SEQ ID NO: 102 with a microRNA backbone and KCNQ4 targeting sequence exemplified by SEQ ID NO: 126 engineered into the chimeric intron, optionally a cloning site exemplified by SEQ ID NO: 156, an eGFP coding region exemplified by SEQ ID NO: 103, optionally a cloning site exemplified by SEQ ID NO: 157, a microRNA backbone and KCNQ4 targeting sequence exemplified by SEQ ID NO: 126, optionally a cloning site exemplified by SEQ ID NO: 158, a polyA site exemplified by SEQ ID NO: 36, optionally a cloning site exemplified by SEQ ID NO: 159, and a 3′ ITR exemplified by SEQ ID NO: 20.

[0323] In one embodiment, an exemplary construct comprises: a 5′ ITR exemplified by SEQ ID NO: 19, optionally a cloning site exemplified by SEQ ID NO: 155, a CMV enhancer exemplified by SEQ ID NO: 22, a CBA promoter exemplified by SEQ ID NO: 101, a chimeric intron exemplified by SEQ ID NO: 102 with a microRNA backbone and KCNQ4 targeting sequence exemplified by SEQ ID NO: 127 engineered into the chimeric intron, optionally a cloning site exemplified by SEQ ID NO: 156, an eGFP coding region exemplified by SEQ ID NO: 103, optionally a cloning site exemplified by SEQ ID NO: 157, a microRNA backbone and KCNQ4 targeting sequence exemplified by SEQ ID NO: 127, optionally a cloning site exemplified by SEQ ID NO: 158, a polyA site exemplified by SEQ ID NO: 36, optionally a cloning site exemplified by SEQ ID NO: 159, and a 3′ ITR exemplified by SEQ ID NO: 20.

[0324] In one embodiment, an exemplary construct comprises: a 5′ ITR exemplified by SEQ ID NO: 19, optionally a cloning site exemplified by SEQ ID NO: 155, a CMV enhancer exemplified by SEQ ID NO: 22, a CBA promoter exemplified by SEQ ID NO: 101, a chimeric intron exemplified by SEQ ID NO: 102 with a microRNA backbone and KCNQ4 targeting sequence exemplified by SEQ ID NO: 128 engineered into the chimeric intron, optionally a cloning site exemplified by SEQ ID NO: 156, an eGFP coding region exemplified by SEQ ID NO: 103, optionally a cloning site exemplified by SEQ ID NO: 157, a microRNA backbone and KCNQ4 targeting sequence exemplified by SEQ ID NO: 128, optionally a cloning site exemplified by SEQ ID NO: 158, a polyA site exemplified by SEQ ID NO: 36, optionally a cloning site exemplified by SEQ ID NO: 159, and a 3′ ITR exemplified by SEQ ID NO: 20.

[0325] In one embodiment, an exemplary construct comprises: a 5′ ITR exemplified by SEQ ID NO: 19, optionally a cloning site exemplified by SEQ ID NO: 155, a CMV enhancer exemplified by SEQ ID NO: 22, a CBA promoter exemplified by SEQ ID NO: 101, a chimeric intron exemplified by SEQ ID NO: 102 with a microRNA backbone and KCNQ4 targeting sequence exemplified by SEQ ID NO: 129 engineered into the chimeric intron, optionally a cloning site exemplified by SEQ ID NO: 156, an eGFP coding region exemplified by SEQ ID NO: 103, optionally a cloning site exemplified by SEQ ID NO: 157, a microRNA backbone and KCNQ4 targeting sequence exemplified by SEQ ID NO: 129, optionally a cloning site exemplified by SEQ ID NO: 158, a polyA site exemplified by SEQ ID NO: 36, optionally a cloning site exemplified by SEQ ID NO: 159, and a 3′ ITR exemplified by SEQ ID NO: 20.

[0326] In one embodiment, an exemplary construct comprises: a 5′ ITR exemplified by SEQ ID NO: 19, optionally a cloning site exemplified by SEQ ID NO: 155, a CMV enhancer exemplified by SEQ ID NO: 22, a CBA promoter exemplified by SEQ ID NO: 101, a chimeric intron exemplified by SEQ ID NO: 102 with a microRNA backbone and KCNQ4 targeting sequence exemplified by SEQ ID NO: 130 engineered into the chimeric intron, optionally a cloning site exemplified by SEQ ID NO: 156, an eGFP coding region exemplified by SEQ ID NO: 103, optionally a cloning site exemplified by SEQ ID NO: 157, a microRNA backbone and KCNQ4 targeting sequence exemplified by SEQ ID NO: 130, optionally a cloning site exemplified by SEQ ID NO: 158, a polyA site exemplified by SEQ ID NO: 36, optionally a cloning site exemplified by SEQ ID NO: 159, and a 3′ ITR exemplified by SEQ ID NO: 20.

[0327] In one embodiment, an exemplary construct comprises: a 5′ ITR exemplified by SEQ ID NO: 19, optionally a cloning site exemplified by SEQ ID NO: 155, a CMV enhancer exemplified by SEQ ID NO: 22, a CBA promoter exemplified by SEQ ID NO: 101, a chimeric intron exemplified by SEQ ID NO: 102 with a microRNA backbone and KCNQ4 targeting sequence exemplified by SEQ ID NO: 131 engineered into the chimeric intron, optionally a cloning site exemplified by SEQ ID NO: 156, an eGFP coding region exemplified by SEQ ID NO: 103, optionally a cloning site exemplified by SEQ ID NO: 157, a microRNA backbone and KCNQ4 targeting sequence exemplified by SEQ ID NO: 131, optionally a cloning site exemplified by SEQ ID NO: 158, a polyA site exemplified by SEQ ID NO: 36, optionally a cloning site exemplified by SEQ ID NO: 159, and a 3′ ITR exemplified by SEQ ID NO: 20.

[0328] In one embodiment, an exemplary construct comprises: a 5′ ITR exemplified by SEQ ID NO: 19, optionally a cloning site exemplified by SEQ ID NO: 155, a CMV enhancer exemplified by SEQ ID NO: 22, a CBA promoter exemplified by SEQ ID NO: 101, a chimeric intron exemplified by SEQ ID NO: 102 with a microRNA backbone and KCNQ4 targeting sequence exemplified by SEQ ID NO: 132 engineered into the chimeric intron, optionally a cloning site exemplified by SEQ ID NO: 156, an eGFP coding region exemplified by SEQ ID NO: 103, optionally a cloning site exemplified by SEQ ID NO: 157, a microRNA backbone and KCNQ4 targeting sequence exemplified by SEQ ID NO: 132, optionally a cloning site exemplified by SEQ ID NO: 158, a polyA site exemplified by SEQ ID NO: 36, optionally a cloning site exemplified by SEQ ID NO: 159, and a 3′ ITR exemplified by SEQ ID NO: 20.

[0329] In one embodiment, an exemplary construct comprises: a 5′ ITR exemplified by SEQ ID NO: 19, optionally a cloning site exemplified by SEQ ID NO: 155, a CMV enhancer exemplified by SEQ ID NO: 22, a CBA promoter exemplified by SEQ ID NO: 101, a chimeric intron exemplified by SEQ ID NO: 102 with a microRNA backbone and KCNQ4 targeting sequence exemplified by SEQ ID NO: 133 engineered into the chimeric intron, optionally a cloning site exemplified by SEQ ID NO: 156, an eGFP coding region exemplified by SEQ ID NO: 103, optionally a cloning site exemplified by SEQ ID NO: 157, a microRNA backbone and KCNQ4 targeting sequence exemplified by SEQ ID NO: 133, optionally a cloning site exemplified by SEQ ID NO: 158, a polyA site exemplified by SEQ ID NO: 36, optionally a cloning site exemplified by SEQ ID NO: 159, and a 3′ ITR exemplified by SEQ ID NO: 20.

[0330] In one embodiment, an exemplary construct comprises: a 5′ ITR exemplified by SEQ ID NO: 19, optionally a cloning site exemplified by SEQ ID NO: 155, a CMV enhancer exemplified by SEQ ID NO: 22, a CBA promoter exemplified by SEQ ID NO: 101, a chimeric intron exemplified by SEQ ID NO: 102 with a microRNA backbone and KCNQ4 targeting sequence exemplified by SEQ ID NO: 133 engineered into the chimeric intron, optionally a cloning site exemplified by SEQ ID NO: 156, an eGFP coding region exemplified by SEQ ID NO: 103, optionally a cloning site exemplified by SEQ ID NO: 157, a microRNA backbone and KCNQ4 targeting sequence exemplified by SEQ ID NO: 133, optionally a cloning site exemplified by SEQ ID NO: 158, a polyA site exemplified by SEQ ID NO: 36, optionally a cloning site exemplified by SEQ ID NO: 159, and a 3′ ITR exemplified by SEQ ID NO: 20.

[0331] In some embodiments, an exemplary construct comprises: a 5′ ITR exemplified by SEQ ID NO: 19, optionally a cloning site exemplified by SEQ ID NO: 155, a CMV enhancer exemplified by SEQ ID NO: 22, a CBA promoter exemplified by SEQ ID NO: 101, a chimeric intron exemplified by SEQ ID NO: 102 with a microRNA backbone and KCNQ4 targeting sequence described herein engineered into the chimeric intron, optionally a cloning site exemplified by SEQ ID NO: 156, an eGFP coding region exemplified by SEQ ID NO: 103, optionally a cloning site exemplified by SEQ ID NO: 157, a microRNA backbone and KCNQ4 targeting sequence described herein, optionally a cloning site exemplified by SEQ ID NO: 158, a polyA site exemplified by SEQ ID NO: 36, optionally a cloning site exemplified by SEQ ID NO: 159, and a 3′ ITR exemplified by SEQ ID NO: 20.

[0332] In one embodiment, an exemplary construct comprises: a 5′ ITR exemplified by SEQ ID NO: 19, optionally a cloning site exemplified by SEQ ID NO: 155, a CMV enhancer exemplified by SEQ ID NO: 22, a CBA promoter exemplified by SEQ ID NO: 101, a chimeric intron exemplified by SEQ ID NO: 102 with a microRNA backbone and KCNQ4 targeting sequence described herein engineered into the chimeric intron, optionally a cloning site exemplified by SEQ ID NO: 156, an eGFP coding region exemplified by SEQ ID NO: 103, optionally a cloning site exemplified by SEQ ID NO: 158, a polyA site exemplified by SEQ ID NO: 36, optionally a cloning site exemplified by SEQ ID NO: 159, and a 3′ ITR exemplified by SEQ ID NO: 20.

[0333] In one embodiment, an exemplary construct comprises: a 5′ ITR exemplified by SEQ ID NO: 19, optionally a cloning site exemplified by SEQ ID NO: 155, a CMV enhancer exemplified by SEQ ID NO: 22, a CBA promoter exemplified by SEQ ID NO: 24, a chimeric intron exemplified by SEQ ID NO: 102, optionally a cloning site exemplified by SEQ ID NO: 156, an eGFP coding region exemplified by SEQ ID NO: 103, a microRNA backbone and KCNQ4 targeting sequence described herein, optionally a cloning site exemplified by SEQ ID NO: 158, a polyA site exemplified by SEQ ID NO: 36, optionally a cloning site exemplified by SEQ ID NO: 159, and a 3′ ITR exemplified by SEQ ID NO: 20.

[0334] In some embodiments, a microRNA backbone with a KCNQ4 targeting sequence occurs twice within the plasmid construct. For example, a microRNA backbone with a KCNQ4 targeting sequence can occur once in the 3′ untranslated region after the EGFP coding sequence. In some embodiments, a microRNA backbone with a KCNQ4 targeting sequence occurs once in the plasmid construct. For example, a microRNA backbone with a KCNQ4 targeting sequence can occur in the intron of the CAG promoter region. As another example, a microRNA backbone with a KCNQ4 targeting sequence can occur in the 3′ untranslated region after the EGFP coding sequence.

Luciferase and GFP Knockdown Constructs with shRNA Sequences

[0335] In one embodiment, an exemplary construct comprises: a 5′ ITR exemplified by SEQ ID NO: 19, optionally a cloning site exemplified by SEQ ID NO: 160, a CMV enhancer exemplified by SEQ ID NO: 98, a CMV promoter exemplified by SEQ ID NO: 99, optionally a cloning site exemplified by SEQ ID NO: 161, a luciferase coding sequence exemplified by SEQ ID NO: 140, optionally a cloning site exemplified by SEQ ID NO: 162, a T2A sequence exemplified by SEQ ID NO: 141, a turboGFP coding region exemplified by SEQ ID NO: 142, optionally a cloning site exemplified by SEQ ID NO: 163, an SV40 poly(A) site exemplified by SEQ ID NO: 143, optionally a cloning site exemplified by SEQ ID NO: 164, a U6 promoter sequence exemplified by SEQ ID NO: 144, an shRNA sequence described herein, a Pol III transcription termination sequence exemplified by SEQ ID NO: 149, optionally a cloning site exemplified by SEQ ID NO: 159, and a 3′ ITR exemplified by SEQ ID NO: 20.

[0336] In one embodiment, an exemplary construct comprises: a 5′ ITR exemplified by SEQ ID NO: 19, optionally a cloning site exemplified by SEQ ID NO: 160, a CMV enhancer exemplified by SEQ ID NO: 98, a CMV promoter exemplified by SEQ ID NO: 99, optionally a cloning site exemplified by SEQ ID NO: 161, a luciferase coding sequence exemplified by SEQ ID NO: 140, optionally a cloning site exemplified by SEQ ID NO: 162, a T2A sequence exemplified by SEQ ID NO: 141, a turboGFP coding region exemplified by SEQ ID NO: 142, optionally a cloning site exemplified by SEQ ID NO: 163, an SV40 poly(A) site exemplified by SEQ ID NO: 143, optionally a cloning site exemplified by SEQ ID NO: 164, a U6 promoter sequence exemplified by SEQ ID NO: 144, an shRNA sequence exemplified by SEQ ID NO: 48, a Pol III transcription termination sequence exemplified by SEQ ID NO: 149, optionally a cloning site exemplified by SEQ ID NO: 159, and a 3′ ITR exemplified by SEQ ID NO: 20.

[0337] In one embodiment, an exemplary construct comprises: a 5′ ITR exemplified by SEQ ID NO: 19, optionally a cloning site exemplified by SEQ ID NO: 160, a CMV enhancer exemplified by SEQ ID NO: 98, a CMV promoter exemplified by SEQ ID NO: 99, optionally a cloning site exemplified by SEQ ID NO: 161, a luciferase coding sequence exemplified by SEQ ID NO: 140, optionally a cloning site exemplified by SEQ ID NO: 162, a T2A sequence exemplified by SEQ ID NO: 141, a turboGFP coding region exemplified by SEQ ID NO: 142, optionally a cloning site exemplified by SEQ ID NO: 163, an SV40 poly(A) site exemplified by SEQ ID NO: 143, optionally a cloning site exemplified by SEQ ID NO: 164, a U6 promoter sequence exemplified by SEQ ID NO: 144, an shRNA sequence exemplified by SEQ ID NO: 49, a Pol III transcription termination sequence exemplified by SEQ ID NO: 149, optionally a cloning site exemplified by SEQ ID NO: 159, and a 3′ ITR exemplified by SEQ ID NO: 20.

[0338] In one embodiment, an exemplary construct comprises: a 5′ ITR exemplified by SEQ ID NO: 19, optionally a cloning site exemplified by SEQ ID NO: 160, a CMV enhancer exemplified by SEQ ID NO: 98, a CMV promoter exemplified by SEQ ID NO: 99, optionally a cloning site exemplified by SEQ ID NO: 161, a luciferase coding sequence exemplified by SEQ ID NO: 140, optionally a cloning site exemplified by SEQ ID NO: 162, a T2A sequence exemplified by SEQ ID NO: 141, a turboGFP coding region exemplified by SEQ ID NO: 142, optionally a cloning site exemplified by SEQ ID NO: 163, an SV40 poly(A) site exemplified by SEQ ID NO: 143, optionally a cloning site exemplified by SEQ ID NO: 164, a U6 promoter sequence exemplified by SEQ ID NO: 144, an shRNA sequence exemplified by SEQ ID NO: 50, a Pol III transcription termination sequence exemplified by SEQ ID NO: 149, optionally a cloning site exemplified by SEQ ID NO: 159, and a 3′ ITR exemplified by SEQ ID NO: 20.

[0339] In one embodiment, an exemplary construct comprises: a 5′ ITR exemplified by SEQ ID NO: 19, optionally a cloning site exemplified by SEQ ID NO: 160, a CMV enhancer exemplified by SEQ ID NO: 98, a CMV promoter exemplified by SEQ ID NO: 99, optionally a cloning site exemplified by SEQ ID NO: 161, a luciferase coding sequence exemplified by SEQ ID NO: 140, optionally a cloning site exemplified by SEQ ID NO: 162, a T2A sequence exemplified by SEQ ID NO: 141, a turboGFP coding region exemplified by SEQ ID NO: 142, optionally a cloning site exemplified by SEQ ID NO: 163, an SV40 poly(A) site exemplified by SEQ ID NO: 143, optionally a cloning site exemplified by SEQ ID NO: 164, a U6 promoter sequence exemplified by SEQ ID NO: 144, an shRNA sequence exemplified by SEQ ID NO: 51, a Pol III transcription termination sequence exemplified by SEQ ID NO: 149, optionally a cloning site exemplified by SEQ ID NO: 159, and a 3′ ITR exemplified by SEQ ID NO: 20.

[0340] In one embodiment, an exemplary construct comprises: a 5′ ITR exemplified by SEQ ID NO: 19, optionally a cloning site exemplified by SEQ ID NO: 160, a CMV enhancer exemplified by SEQ ID NO: 98, a CMV promoter exemplified by SEQ ID NO: 99, optionally a cloning site exemplified by SEQ ID NO: 161, a luciferase coding sequence exemplified by SEQ ID NO: 140, optionally a cloning site exemplified by SEQ ID NO: 162, a T2A sequence exemplified by SEQ ID NO: 141, a turboGFP coding region exemplified by SEQ ID NO: 142, optionally a cloning site exemplified by SEQ ID NO: 163, an SV40 poly(A) site exemplified by SEQ ID NO: 143, optionally a cloning site exemplified by SEQ ID NO: 164, a U6 promoter sequence exemplified by SEQ ID NO: 144, an shRNA sequence exemplified by SEQ ID NO: 52, a Pol III transcription termination sequence exemplified by SEQ ID NO: 149, optionally a cloning site exemplified by SEQ ID NO: 159, and a 3′ ITR exemplified by SEQ ID NO: 20.

[0341] In one embodiment, an exemplary construct comprises: a 5′ ITR exemplified by SEQ ID NO: 19, optionally a cloning site exemplified by SEQ ID NO: 160, a CMV enhancer exemplified by SEQ ID NO: 98, a CMV promoter exemplified by SEQ ID NO: 99, optionally a cloning site exemplified by SEQ ID NO: 161, a luciferase coding sequence exemplified by SEQ ID NO: 140, optionally a cloning site exemplified by SEQ ID NO: 162, a T2A sequence exemplified by SEQ ID NO: 141, a turboGFP coding region exemplified by SEQ ID NO: 142, optionally a cloning site exemplified by SEQ ID NO: 163, an SV40 poly(A) site exemplified by SEQ ID NO: 143, optionally a cloning site exemplified by SEQ ID NO: 164, a U6 promoter sequence exemplified by SEQ ID NO: 144, an shRNA sequence exemplified by SEQ ID NO: 53, a Pol III transcription termination sequence exemplified by SEQ ID NO: 149, optionally a cloning site exemplified by SEQ ID NO: 159, and a 3′ ITR exemplified by SEQ ID NO: 20.

[0342] In one embodiment, an exemplary construct comprises: a 5′ ITR exemplified by SEQ ID NO: 19, optionally a cloning site exemplified by SEQ ID NO: 160, a CMV enhancer exemplified by SEQ ID NO: 98, a CMV promoter exemplified by SEQ ID NO: 99, optionally a cloning site exemplified by SEQ ID NO: 161, a luciferase coding sequence exemplified by SEQ ID NO: 140, optionally a cloning site exemplified by SEQ ID NO: 162, a T2A sequence exemplified by SEQ ID NO: 141, a turboGFP coding region exemplified by SEQ ID NO: 142, optionally a cloning site exemplified by SEQ ID NO: 163, an SV40 poly(A) site exemplified by SEQ ID NO: 143, optionally a cloning site exemplified by SEQ ID NO: 164, a U6 promoter sequence exemplified by SEQ ID NO: 144, an shRNA sequence exemplified by SEQ ID NO: 54, a Pol III transcription termination sequence exemplified by SEQ ID NO: 149, optionally a cloning site exemplified by SEQ ID NO: 159, and a 3′ ITR exemplified by SEQ ID NO: 20.

[0343] In one embodiment, an exemplary construct comprises: a 5′ ITR exemplified by SEQ ID NO: 19, optionally a cloning site exemplified by SEQ ID NO: 160, a CMV enhancer exemplified by SEQ ID NO: 98, a CMV promoter exemplified by SEQ ID NO: 99, optionally a cloning site exemplified by SEQ ID NO: 161, a luciferase coding sequence exemplified by SEQ ID NO: 140, optionally a cloning site exemplified by SEQ ID NO: 162, a T2A sequence exemplified by SEQ ID NO: 141, a turboGFP coding region exemplified by SEQ ID NO: 142, optionally a cloning site exemplified by SEQ ID NO: 163, an SV40 poly(A) site exemplified by SEQ ID NO: 143, optionally a cloning site exemplified by SEQ ID NO: 164, a U6 promoter sequence exemplified by SEQ ID NO: 144, an shRNA sequence exemplified by SEQ ID NO: 55, a Pol III transcription termination sequence exemplified by SEQ ID NO: 149, optionally a cloning site exemplified by SEQ ID NO: 159, and a 3′ ITR exemplified by SEQ ID NO: 20.

Wild-Type hKCNQ4 Construct Sequences

[0344] In one embodiment, an exemplary construct comprises: a 5′ ITR exemplified by SEQ ID NO: 19, optionally a cloning site exemplified by SEQ ID NO: 160, a CMV enhancer exemplified by SEQ ID NO: 98, a CMV promoter exemplified by SEQ ID NO: 99, optionally a cloning site exemplified by SEQ ID NO: 161, mKCNQ4 wild-type coding sequence exemplified by SEQ ID NO: 91, optionally a cloning site exemplified by SEQ ID NO: 165, a 3×Flag tag sequence exemplified by SEQ ID NO: 145, optionally a cloning site exemplified by SEQ ID NO: 162, a T2A sequence exemplified by SEQ ID NO: 141, an mScarlet coding region exemplified by SEQ ID NO: 146, optionally a cloning site exemplified by SEQ ID NO: 166, a bGHpoly(a) signal exemplified by SEQ ID NO: 36, optionally a cloning site exemplified by SEQ ID NO: 159, and a 3′ ITR exemplified by SEQ ID NO: 18.

[0345] In one embodiment, an exemplary construct comprises: a 5′ ITR exemplified by SEQ ID NO: 19, optionally a cloning site exemplified by SEQ ID NO: 160, a CMV enhancer exemplified by SEQ ID NO: 98, a CMV promoter exemplified by SEQ ID NO: 99, optionally a cloning site exemplified by SEQ ID NO: 161, hKCNQ4 wild-type coding sequence exemplified by SEQ ID NO: 90, optionally a cloning site exemplified by SEQ ID NO: 165, a 3×Flag tag sequence exemplified by SEQ ID NO: 145, optionally a cloning site exemplified by SEQ ID NO: 162, a T2A sequence exemplified by SEQ ID NO: 141, an mScarlet coding region exemplified by SEQ ID NO: 146, optionally a cloning site exemplified by SEQ ID NO: 166, a bGHpoly(a) signal exemplified by SEQ ID NO: 36, optionally a cloning site exemplified by SEQ ID NO: 159, and a 3′ ITR exemplified by SEQ ID NO: 18.

Codon Optimized hKCNQ4 Construct Sequences

[0346] In one embodiment, an exemplary construct comprises: a 5′ ITR exemplified by SEQ ID NO: 19, optionally a cloning site exemplified by SEQ ID NO: 160, a CMV enhancer exemplified by SEQ ID NO: 98, a CMV promoter exemplified by SEQ ID NO: 99, optionally a cloning site exemplified by SEQ ID NO: 161, a hKCNQ4 codon optimized coding sequence exemplified by SEQ ID NO: 9, optionally a cloning site exemplified by SEQ ID NO: 165, a 3×Flag tag sequence exemplified by SEQ ID NO: 145, optionally a cloning site exemplified by SEQ ID NO: 162, a T2A sequence exemplified by SEQ ID NO: 141, a mScarlet coding region exemplified by SEQ ID NO: 146, optionally a cloning site exemplified by SEQ ID NO: 166, a bGHpoly(a) signal exemplified by SEQ ID NO: 36, optionally a cloning site exemplified by SEQ ID NO: 159, and a 3′ ITR exemplified by SEQ ID NO: 20.

[0347] In one embodiment, an exemplary construct comprises: a 5′ ITR exemplified by SEQ ID NO: 19, optionally a cloning site exemplified by SEQ ID NO: 160, a CMV enhancer exemplified by SEQ ID NO: 98, a CMV promoter exemplified by SEQ ID NO: 99, optionally a cloning site exemplified by SEQ ID NO: 161, a hKCNQ4 codon optimized coding sequence exemplified by SEQ ID NO: 10, optionally a cloning site exemplified by SEQ ID NO: 165, a 3×Flag tag sequence exemplified by SEQ ID NO: 145, optionally a cloning site exemplified by SEQ ID NO: 162, a T2A sequence exemplified by SEQ ID NO: 141, a mScarlet coding region exemplified by SEQ ID NO: 146, optionally a cloning site exemplified by SEQ ID NO: 166, a bGHpoly(a) signal exemplified by SEQ ID NO: 36, optionally a cloning site exemplified by SEQ ID NO: 159, and a 3′ ITR exemplified by SEQ ID NO: 20.

[0348] In one embodiment, an exemplary construct comprises: a 5′ ITR exemplified by SEQ ID NO: 19, optionally a cloning site exemplified by SEQ ID NO: 160, a CMV enhancer exemplified by SEQ ID NO: 98, a CMV promoter exemplified by SEQ ID NO: 100, optionally a cloning site exemplified by SEQ ID NO: 161, a hKCNQ4 codon optimized coding sequence exemplified by SEQ ID NO: 9, optionally a cloning site exemplified by SEQ ID NO: 166, a bGHpoly(a) signal exemplified by SEQ ID NO: 36, optionally a cloning site exemplified by SEQ ID NO: 164, a U6 promoter sequence exemplified by SEQ ID NO: 144, a guide RNA sequence exemplified by SEQ ID NO: 42, a tcrRNA sequence exemplified by SEQ ID NO: 147, a Pol III transcription termination sequence exemplified by SEQ ID NO: 149, optionally a cloning site exemplified by SEQ ID NO: 167, and a 3′ ITR exemplified by SEQ ID NO: 20.

[0349] In one embodiment, an exemplary construct comprises: a 5′ ITR exemplified by SEQ ID NO: 19, optionally a cloning site exemplified by SEQ ID NO: 160, a CMV enhancer exemplified by SEQ ID NO: 98, a CMV promoter exemplified by SEQ ID NO: 100, optionally a cloning site exemplified by SEQ ID NO: 161, a hKCNQ4 codon optimized coding sequence exemplified by SEQ ID NO: 9, optionally a cloning site exemplified by SEQ ID NO: 166, a bGHpoly(a) signal exemplified by SEQ ID NO: 36, optionally a cloning site exemplified by SEQ ID NO: 164, a U6 promoter sequence exemplified by SEQ ID NO: 144, a guide RNA sequence exemplified by SEQ ID NO: 43, a tcrRNA sequence exemplified by SEQ ID NO: 147, a Pol III transcription termination sequence exemplified by SEQ ID NO: 149, optionally a cloning site exemplified by SEQ ID NO: 167, and a 3′ ITR exemplified by SEQ ID NO: 20.

[0350] In one embodiment, an exemplary construct comprises: a 5′ ITR exemplified by SEQ ID NO: 19, optionally a cloning site exemplified by SEQ ID NO: 160, a CMV enhancer exemplified by SEQ ID NO: 98, a CMV promoter exemplified by SEQ ID NO: 100, optionally a cloning site exemplified by SEQ ID NO: 161, a hKCNQ4 codon optimized coding sequence exemplified by SEQ ID NO: 9, optionally a cloning site exemplified by SEQ ID NO: 166, a bGHpoly(a) signal exemplified by SEQ ID NO: 36, optionally a cloning site exemplified by SEQ ID NO: 164, a U6 promoter sequence exemplified by SEQ ID NO: 144, a guide RNA sequence exemplified by SEQ ID NO: 150, a tcrRNA sequence exemplified by SEQ ID NO: 147, a Pol III transcription termination sequence exemplified by SEQ ID NO: 149, optionally a cloning site exemplified by SEQ ID NO: 167, and a 3′ ITR exemplified by SEQ ID NO: 20.

### Cas9 Construct Sequences

[0351] In one embodiment, an exemplary construct comprises: a 5′ ITR exemplified by SEQ ID NO: 19, optionally a cloning site exemplified by SEQ ID NO: 155, a CMV enhancer exemplified by SEQ ID NO: 98, a CMV promoter exemplified by SEQ ID NO: 99, optionally a cloning site exemplified by SEQ ID NO: 161, an SV40 nuclear localization signal exemplified by SEQ ID NO: 151, optionally a cloning site exemplified by SEQ ID NO: 168, a catalytically-inactive saCas9 coding sequence exemplified by SEQ ID NO: 152, optionally a cloning site exemplified by SEQ ID NO: 169, an SV40 nuclear localization signal exemplified by SEQ ID NO: 153, optionally a cloning site exemplified by SEQ ID NO: 166, an SV40 poly(A) signal sequence exemplified by SEQ ID NO: 143, optionally a cloning site exemplified by SEQ ID NO: 159, and a 3′ ITR exemplified by SEQ ID NO: 20.

[0352] In one embodiment, an exemplary construct comprises: a 5′ ITR exemplified by SEQ ID NO: 19, optionally a cloning site exemplified by SEQ ID NO: 155, a CMV promoter exemplified by SEQ ID NO: 99, optionally a cloning site exemplified by SEQ ID NO: 161, an SV40 nuclear localization signal exemplified by SEQ ID NO: 151, optionally a cloning site exemplified by SEQ ID NO: 168, a catalytically-inactive saCas9 coding sequence exemplified by SEQ ID NO: 152, optionally a cloning site exemplified by SEQ ID NO: 169, an SV40 nuclear localization signal exemplified by SEQ ID NO: 153, optionally a cloning site exemplified by SEQ ID NO: 166, an SV40 poly(A) signal sequence exemplified by SEQ ID NO: 143, optionally a cloning site exemplified by SEQ ID NO: 159, and a 3′ ITR exemplified by SEQ ID NO: 20.

[0353] In one embodiment, an exemplary construct comprises: a 5′ ITR exemplified by SEQ ID NO: 19, optionally a cloning site exemplified by SEQ ID NO: 155, a CMV enhancer exemplified by SEQ ID NO: 98, a CMV promoter exemplified by SEQ ID NO: 99, optionally a cloning site exemplified by SEQ ID NO: 161, an SV40 nuclear localization signal exemplified by SEQ ID NO: 151, optionally a cloning site exemplified by SEQ ID NO: 168, a catalytically active saCas9 coding sequence exemplified by SEQ ID NO: 154, optionally a cloning site exemplified by SEQ ID NO: 169, an SV40 nuclear localization signal exemplified by SEQ ID NO: 153, optionally a cloning site exemplified by SEQ ID NO: 166, an SV40 poly(A) signal sequence exemplified by SEQ ID NO: 143, optionally a cloning site exemplified by SEQ ID NO: 159, and a 3′ ITR exemplified by SEQ ID NO: 20.

[0354] In one embodiment, an exemplary construct comprises: a 5′ ITR exemplified by SEQ ID NO: 19, optionally a cloning site exemplified by SEQ ID NO: 155, a CMV promoter exemplified by SEQ ID NO: 99, optionally a cloning site exemplified by SEQ ID NO: 161, an SV40 nuclear localization signal exemplified by SEQ ID NO: 151, optionally a cloning site exemplified by SEQ ID NO: 168, a catalytically saCas9 coding sequence exemplified by SEQ ID NO: 154, optionally a cloning site exemplified by SEQ ID NO: 169, an SV40 nuclear localization signal exemplified by SEQ ID NO: 153, optionally a cloning site exemplified by SEQ ID NO: 166, an SV40 poly(A) signal sequence exemplified by SEQ ID NO: 143, optionally a cloning site exemplified by SEQ ID NO: 159, and a 3′ ITR exemplified by SEQ ID NO: 20.

Cas9 with eGFP and sgRNA Construct Sequences

[0355] In one embodiment, an exemplary construct comprises: a 5′ ITR exemplified by SEQ ID NO: 19, optionally a cloning site exemplified by SEQ ID NO: 160, a CMV enhancer exemplified by SEQ ID NO: 98, a CMV promoter exemplified by SEQ ID NO: 99, optionally a cloning site exemplified by SEQ ID NO: 161, an SV40 nuclear localization signal exemplified by SEQ ID NO: 151, optionally a cloning site exemplified by SEQ ID NO: 168, a catalytically active saCas9 coding sequence exemplified by SEQ ID NO: 154, optionally a cloning site exemplified by SEQ ID NO: 169, an SV40 nuclear localization signal exemplified by SEQ ID NO: 153, optionally a cloning site exemplified by SEQ ID NO: 162, a T2A sequence exemplified by SEQ ID NO: 141, a turboGFP sequence exemplified by SEQ ID NO: 142, optionally a cloning site exemplified by SEQ ID NO: 158, a SV-40 poly(A) signal sequence exemplified by SEQ ID NO: 143, optionally a cloning site exemplified by SEQ ID NO: 164, a U6 promoter sequence exemplified by SEQ ID NO: 144, a guide RNA sequence exemplified by SEQ ID NO: 43, a tcrRNA sequence exemplified by SEQ ID NO: 147, a Pol III transcription termination sequence exemplified by SEQ ID NO: 149, optionally a cloning site exemplified by SEQ ID NO: 170, and a 3′ ITR exemplified by SEQ ID NO: 20.

[0356] In one embodiment, an exemplary construct comprises: a 5′ ITR exemplified by SEQ ID NO: 19, optionally a cloning site exemplified by SEQ ID NO: 160, a CMV enhancer exemplified by SEQ ID NO: 98, a CMV promoter exemplified by SEQ ID NO: 99, optionally a cloning site exemplified by SEQ ID NO: 161, an SV40 nuclear localization signal exemplified by SEQ ID NO: 151, optionally a cloning site exemplified by SEQ ID NO: 168, a catalytically-inactive saCas9 coding sequence exemplified by SEQ ID NO: 152, optionally a cloning site exemplified by SEQ ID NO: 169, an SV40 nuclear localization signal exemplified by SEQ ID NO: 153, optionally a cloning site exemplified by SEQ ID NO: 162, a T2A sequence exemplified by SEQ ID NO: 141, a turboGFP sequence exemplified by SEQ ID NO: 142, optionally a cloning site exemplified by SEQ ID NO: 158, a SV-40 poly(A) signal sequence exemplified by SEQ ID NO: 143, optionally a cloning site exemplified by SEQ ID NO: 164, a U6 promoter sequence exemplified by SEQ ID NO: 144, a guide RNA sequence exemplified by SEQ ID NO: 43, a tcrRNA sequence exemplified by SEQ ID NO: 147, a Pol III transcription termination sequence exemplified by SEQ ID NO: 149, optionally a cloning site exemplified by SEQ ID NO: 170, and a 3′ ITR exemplified by SEQ ID NO: 20.

[0357] In one embodiment, an exemplary construct comprises: a 5′ ITR exemplified by SEQ ID NO: 19, optionally a cloning site exemplified by SEQ ID NO: 160, a CMV enhancer exemplified by SEQ ID NO: 98, a CMV promoter exemplified by SEQ ID NO: 99, optionally a cloning site exemplified by SEQ ID NO: 161, an SV40 nuclear localization signal exemplified by SEQ ID NO: 151, optionally a cloning site exemplified by SEQ ID NO: 168, a catalytically active saCas9 coding sequence exemplified by SEQ ID NO: 154, optionally a cloning site exemplified by SEQ ID NO: 169, an SV40 nuclear localization signal exemplified by SEQ ID NO: 153, optionally a cloning site exemplified by SEQ ID NO: 162, a T2A sequence exemplified by SEQ ID NO: 141, a turboGFP sequence exemplified by SEQ ID NO: 142, optionally a cloning site exemplified by SEQ ID NO: 158, a SV-40 poly(A) signal sequence exemplified by SEQ ID NO: 143, optionally a cloning site exemplified by SEQ ID NO: 164, a U6 promoter sequence exemplified by SEQ ID NO: 144, a guide RNA sequence exemplified by SEQ ID NO: 42, a tcrRNA sequence exemplified by SEQ ID NO: 147, a Pol III transcription termination sequence exemplified by SEQ ID NO: 149, optionally a cloning site exemplified by SEQ ID NO: 170, and a 3′ ITR exemplified by SEQ ID NO: 20.

[0358] In one embodiment, an exemplary construct comprises: a 5′ ITR exemplified by SEQ ID NO: 19, optionally a cloning site exemplified by SEQ ID NO: 160, a CMV enhancer exemplified by SEQ ID NO: 98, a CMV promoter exemplified by SEQ ID NO: 99, optionally a cloning site exemplified by SEQ ID NO: 161, an SV40 nuclear localization signal exemplified by SEQ ID NO: 151, optionally a cloning site exemplified by SEQ ID NO: 168, a catalytically-inactive saCas9 coding sequence exemplified by SEQ ID NO: 152, optionally a cloning site exemplified by SEQ ID NO: 169, an SV40 nuclear localization signal exemplified by SEQ ID NO: 153, optionally a cloning site exemplified by SEQ ID NO: 162, a T2A sequence exemplified by SEQ ID NO: 141, a turboGFP sequence exemplified by SEQ ID NO: 142, optionally a cloning site exemplified by SEQ ID NO: 158, a SV-40 poly(A) signal sequence exemplified by SEQ ID NO: 143, optionally a cloning site exemplified by SEQ ID NO: 164, a U6 promoter sequence exemplified by SEQ ID NO: 144, a guide RNA sequence exemplified by SEQ ID NO: 42, a tcrRNA sequence exemplified by SEQ ID NO: 147, a Pol III transcription termination sequence exemplified by SEQ ID NO: 149, optionally a cloning site exemplified by SEQ ID NO: 170, and a 3′ ITR exemplified by SEQ ID NO: 20.

[0359] In one embodiment, an exemplary construct comprises: a 5′ ITR exemplified by SEQ ID NO: 19, optionally a cloning site exemplified by SEQ ID NO: 160, a CMV enhancer exemplified by SEQ ID NO: 98, a CMV promoter exemplified by SEQ ID NO: 99, optionally a cloning site exemplified by SEQ ID NO: 161, an SV40 nuclear localization signal exemplified by SEQ ID NO: 151, optionally a cloning site exemplified by SEQ ID NO: 168, a catalytically active saCas9 coding sequence exemplified by SEQ ID NO: 154, optionally a cloning site exemplified by SEQ ID NO: 169, an SV40 nuclear localization signal exemplified by SEQ ID NO: 153, optionally a cloning site exemplified by SEQ ID NO: 162, a T2A sequence exemplified by SEQ ID NO: 141, a turboGFP sequence exemplified by SEQ ID NO: 142, optionally a cloning site exemplified by SEQ ID NO: 158, a SV-40 poly(A) signal sequence exemplified by SEQ ID NO: 143, optionally a cloning site exemplified by SEQ ID NO: 164, a U6 promoter sequence exemplified by SEQ ID NO: 144, a guide RNA sequence exemplified by SEQ ID NO: 44, a tcrRNA sequence exemplified by SEQ ID NO: 147, a Pol III transcription termination sequence exemplified by SEQ ID NO: 149, optionally a cloning site exemplified by SEQ ID NO: 170, and a 3′ ITR exemplified by SEQ ID NO: 20.

[0360] In one embodiment, an exemplary construct comprises: a 5′ ITR exemplified by SEQ ID NO: 19, optionally a cloning site exemplified by SEQ ID NO: 160, a CMV enhancer exemplified by SEQ ID NO: 98, a CMV promoter exemplified by SEQ ID NO: 99, optionally a cloning site exemplified by SEQ ID NO: 161, an SV40 nuclear localization signal exemplified by SEQ ID NO: 151, optionally a cloning site exemplified by SEQ ID NO: 168, a catalytically active saCas9 coding sequence exemplified by SEQ ID NO: 154, optionally a cloning site exemplified by SEQ ID NO: 169, an SV40 nuclear localization signal exemplified by SEQ ID NO: 153, optionally a cloning site exemplified by SEQ ID NO: 162, a T2A sequence exemplified by SEQ ID NO: 141, a turboGFP sequence exemplified by SEQ ID NO: 142, optionally a cloning site exemplified by SEQ ID NO: 158, a SV-40 poly(A) signal sequence exemplified by SEQ ID NO: 143, optionally a cloning site exemplified by SEQ ID NO: 164, a U6 promoter sequence exemplified by SEQ ID NO: 144, a guide RNA sequence exemplified by SEQ ID NO: 45, a tcrRNA sequence exemplified by SEQ ID NO: 147, a Pol III transcription termination sequence exemplified by SEQ ID NO: 149, optionally a cloning site exemplified by SEQ ID NO: 170, and a 3′ ITR exemplified by SEQ ID NO: 20.

[0361] In one embodiment, an exemplary construct comprises: a 5′ ITR exemplified by SEQ ID NO: 19, optionally a cloning site exemplified by SEQ ID NO: 160, a CMV enhancer exemplified by SEQ ID NO: 98, a CMV promoter exemplified by SEQ ID NO: 99, optionally a cloning site exemplified by SEQ ID NO: 161, an SV40 nuclear localization signal exemplified by SEQ ID NO: 151, optionally a cloning site exemplified by SEQ ID NO: 168, a catalytically active saCas9 coding sequence exemplified by SEQ ID NO: 154, optionally a cloning site exemplified by SEQ ID NO: 169, an SV40 nuclear localization signal exemplified by SEQ ID NO: 153, optionally a cloning site exemplified by SEQ ID NO: 162, a T2A sequence exemplified by SEQ ID NO: 141, a turboGFP sequence exemplified by SEQ ID NO: 142, optionally a cloning site exemplified by SEQ ID NO: 158, a SV-40 poly(A) signal sequence exemplified by SEQ ID NO: 143, optionally a cloning site exemplified by SEQ ID NO: 164, a U6 promoter sequence exemplified by SEQ ID NO: 144, a guide RNA sequence exemplified by SEQ ID NO: 46, a tcrRNA sequence exemplified by SEQ ID NO: 147, a Pol III transcription termination sequence exemplified by SEQ ID NO: 149, optionally a cloning site exemplified by SEQ ID NO: 170, and a 3′ ITR exemplified by SEQ ID NO: 20.

[0362] In one embodiment, an exemplary construct comprises: a 5′ ITR exemplified by SEQ ID NO: 19, optionally a cloning site exemplified by SEQ ID NO: 160, a CMV enhancer exemplified by SEQ ID NO: 98, a CMV promoter exemplified by SEQ ID NO: 99, optionally a cloning site exemplified by SEQ ID NO: 161, an SV40 nuclear localization signal exemplified by SEQ ID NO: 151, optionally a cloning site exemplified by SEQ ID NO: 168, a catalytically active saCas9 coding sequence exemplified by SEQ ID NO: 154, optionally a cloning site exemplified by SEQ ID NO: 169, an SV40 nuclear localization signal exemplified by SEQ ID NO: 153, optionally a cloning site exemplified by SEQ ID NO: 162, a T2A sequence exemplified by SEQ ID NO: 141, a turboGFP sequence exemplified by SEQ ID NO: 142, optionally a cloning site exemplified by SEQ ID NO: 158, a SV-40 poly(A) signal sequence exemplified by SEQ ID NO: 143, optionally a cloning site exemplified by SEQ ID NO: 164, a U6 promoter sequence exemplified by SEQ ID NO: 144, a guide RNA sequence exemplified by SEQ ID NO: 47, a tcrRNA sequence exemplified by SEQ ID NO: 147, a Pol III transcription termination sequence exemplified by SEQ ID NO: 149, optionally a cloning site exemplified by SEQ ID NO: 170, and a 3′ ITR exemplified by SEQ ID NO: 20.

eGFP and sgRNA Construct Sequences

[0363] In one embodiment, an exemplary construct comprises: a 5′ ITR exemplified by SEQ ID NO: 19, optionally a cloning site exemplified by SEQ ID NO: 160, a CMV enhancer exemplified by SEQ ID NO: 98, a CMV promoter exemplified by SEQ ID NO: 100, optionally a cloning site exemplified by SEQ ID NO: 161, a turboGFP coding sequence exemplified by SEQ ID NO: 142, optionally a cloning site exemplified by SEQ ID NO: 166, a bGHpoly(a) signal exemplified by SEQ ID NO: 36, optionally a cloning site exemplified by SEQ ID NO: 164, a U6 promoter sequence exemplified by SEQ ID NO: 144, a guide RNA sequence exemplified by SEQ ID NO: 42, a tcrRNA sequence exemplified by SEQ ID NO: 147, a Pol III transcription termination sequence exemplified by SEQ ID NO: 149, optionally a cloning site exemplified by SEQ ID NO: 167, and a 3′ ITR exemplified by SEQ ID NO: 20.

[0364] In one embodiment, an exemplary construct comprises: a 5′ ITR exemplified by SEQ ID NO: 19, optionally a cloning site exemplified by SEQ ID NO: 160, a CMV enhancer exemplified by SEQ ID NO: 98, a CMV promoter exemplified by SEQ ID NO: 100, optionally a cloning site exemplified by SEQ ID NO: 161, a turboGFP coding sequence exemplified by SEQ ID NO: 142, optionally a cloning site exemplified by SEQ ID NO: 166, a bGHpoly(a) signal exemplified by SEQ ID NO: 36, optionally a cloning site exemplified by SEQ ID NO: 164, a U6 promoter sequence exemplified by SEQ ID NO: 144, a guide RNA sequence exemplified by SEQ ID NO: 43, a tcrRNA sequence exemplified by SEQ ID NO: 147, a Pol III transcription termination sequence exemplified by SEQ ID NO: 149, optionally a cloning site exemplified by SEQ ID NO: 167, and a 3′ ITR exemplified by SEQ ID NO: 20.

[0365] In one embodiment, an exemplary construct comprises: a 5′ ITR exemplified by SEQ ID NO: 19, optionally a cloning site exemplified by SEQ ID NO: 160, a CMV enhancer exemplified by SEQ ID NO: 98, a CMV promoter exemplified by SEQ ID NO: 100, optionally a cloning site exemplified by SEQ ID NO: 161, a turboGFP coding sequence exemplified by SEQ ID NO: 142, optionally a cloning site exemplified by SEQ ID NO: 166, a bGHpoly(a) signal exemplified by SEQ ID NO: 36, optionally a cloning site exemplified by SEQ ID NO: 164, a U6 promoter sequence exemplified by SEQ ID NO: 144, a guide RNA sequence exemplified by SEQ ID NO: 150, a tcrRNA sequence exemplified by SEQ ID NO: 147, a Pol III transcription termination sequence exemplified by SEQ ID NO: 149, optionally a cloning site exemplified by SEQ ID NO: 167, and a 3′ ITR exemplified by SEQ ID NO: 20.

miRNA Construct Sequences Comprising Mouse KCNQ4 Targeting Sequences

[0366] In one embodiment, an exemplary construct comprises: a 5′ ITR exemplified by SEQ ID NO: 19, optionally a cloning site exemplified by SEQ ID NO: 155, a CMV enhancer exemplified by SEQ ID NO: 22, a CBA promoter exemplified by SEQ ID NO: 101, a chimeric intron exemplified by SEQ ID NO: 102 with a human microRNA backbone and mouse KCNQ4 targeting sequence exemplified by SEQ ID NO: 135 engineered into the chimeric intron, optionally a cloning site exemplified by SEQ ID NO: 156, an eGFP coding region exemplified by SEQ ID NO: 103, optionally a cloning site exemplified by SEQ ID NO: 157, a microRNA backbone and KCNQ4 targeting sequence exemplified by SEQ ID NO: 135, optionally a cloning site exemplified by SEQ ID NO: 158, a polyA site exemplified by SEQ ID NO: 36, optionally a cloning site exemplified by SEQ ID NO: 159, and a 3′ ITR exemplified by SEQ ID NO: 20.

[0367] In one embodiment, an exemplary construct comprises: a 5′ ITR exemplified by SEQ ID NO: 19, optionally a cloning site exemplified by SEQ ID NO: 155, a CMV enhancer exemplified by SEQ ID NO: 22, a CBA promoter exemplified by SEQ ID NO: 101, a chimeric intron exemplified by SEQ ID NO: 102 with a human microRNA backbone and mouse KCNQ4 targeting sequence exemplified by SEQ ID NO: 135 engineered into the chimeric intron, optionally a cloning site exemplified by SEQ ID NO: 156, an KCNQ4 coding region exemplified by SEQ ID NO: 10, optionally a cloning site exemplified by SEQ ID NO: 157, a microRNA backbone and KCNQ4 targeting sequence exemplified by SEQ ID NO: 135, optionally a cloning site exemplified by SEQ ID NO: 158, a polyA site exemplified by SEQ ID NO: 36, optionally a cloning site exemplified by SEQ ID NO: 159, and a 3′ ITR exemplified by SEQ ID NO: 20.

[0368] In one embodiment, an exemplary construct comprises: a 5′ ITR exemplified by SEQ ID NO: 19, optionally a cloning site exemplified by SEQ ID NO: 155, a CMV enhancer exemplified by SEQ ID NO: 22, a CBA promoter exemplified by SEQ ID NO: 101, a chimeric intron exemplified by SEQ ID NO: 102 with a human microRNA backbone and mouse KCNQ4 targeting sequence exemplified by SEQ ID NO: 136 engineered into the chimeric intron, optionally a cloning site exemplified by SEQ ID NO: 156, an eGFP coding region exemplified by SEQ ID NO: 103, optionally a cloning site exemplified by SEQ ID NO: 157, a microRNA backbone and KCNQ4 targeting sequence exemplified by SEQ ID NO: 135, optionally a cloning site exemplified by SEQ ID NO: 158, a polyA site exemplified by SEQ ID NO: 36, optionally a cloning site exemplified by SEQ ID NO: 159, and a 3′ ITR exemplified by SEQ ID NO: 20.

[0369] In one embodiment, an exemplary construct comprises: a 5′ ITR exemplified by SEQ ID NO: 19, optionally a cloning site exemplified by SEQ ID NO: 155, a CMV enhancer exemplified by SEQ ID NO: 22, a CBA promoter exemplified by SEQ ID NO: 101, a chimeric intron exemplified by SEQ ID NO: 102 with a human microRNA backbone and mouse KCNQ4 targeting sequence exemplified by SEQ ID NO: 136 engineered into the chimeric intron, optionally a cloning site exemplified by SEQ ID NO: 156, an KCNQ4 coding region exemplified by SEQ ID NO: 10, optionally a cloning site exemplified by SEQ ID NO: 157, a microRNA backbone and KCNQ4 targeting sequence exemplified by SEQ ID NO: 135, optionally a cloning site exemplified by SEQ ID NO: 158, a polyA site exemplified by SEQ ID NO: 36, optionally a cloning site exemplified by SEQ ID NO: 159, and a 3′ ITR exemplified by SEQ ID NO: 20.

[0370] In one embodiment, an exemplary construct comprises: a 5′ ITR exemplified by SEQ ID NO: 19, optionally a cloning site exemplified by SEQ ID NO: 155, a CMV enhancer exemplified by SEQ ID NO: 22, a CBA promoter exemplified by SEQ ID NO: 101, a chimeric intron exemplified by SEQ ID NO: 102 with a human microRNA backbone and mouse KCNQ4 targeting sequence exemplified by SEQ ID NO: 137 engineered into the chimeric intron, optionally a cloning site exemplified by SEQ ID NO: 156, an eGFP coding region exemplified by SEQ ID NO: 103, optionally a cloning site exemplified by SEQ ID NO: 157, a microRNA backbone and KCNQ4 targeting sequence exemplified by SEQ ID NO: 135, optionally a cloning site exemplified by SEQ ID NO: 158, a polyA site exemplified by SEQ ID NO: 36, optionally a cloning site exemplified by SEQ ID NO: 159, and a 3′ ITR exemplified by SEQ ID NO: 20.

[0371] In one embodiment, an exemplary construct comprises: a 5′ ITR exemplified by SEQ ID NO: 19, optionally a cloning site exemplified by SEQ ID NO: 155, a CMV enhancer exemplified by SEQ ID NO: 22, a CBA promoter exemplified by SEQ ID NO: 101, a chimeric intron exemplified by SEQ ID NO: 102 with a human microRNA backbone and mouse KCNQ4 targeting sequence exemplified by SEQ ID NO: 137 engineered into the chimeric intron, optionally a cloning site exemplified by SEQ ID NO: 156, an KCNQ4 coding region exemplified by SEQ ID NO: 10, optionally a cloning site exemplified by SEQ ID NO: 157, a microRNA backbone and KCNQ4 targeting sequence exemplified by SEQ ID NO: 135, optionally a cloning site exemplified by SEQ ID NO: 158, a polyA site exemplified by SEQ ID NO: 36, optionally a cloning site exemplified by SEQ ID NO: 159, and a 3′ ITR exemplified by SEQ ID NO: 20.

[0372] In one embodiment, an exemplary construct comprises: a 5′ ITR exemplified by SEQ ID NO: 19, optionally a cloning site exemplified by SEQ ID NO: 155, a CMV enhancer exemplified by SEQ ID NO: 22, a CBA promoter exemplified by SEQ ID NO: 101, a chimeric intron exemplified by SEQ ID NO: 102 with a human microRNA backbone and mouse KCNQ4 targeting sequence exemplified by SEQ ID NO: 136 engineered into the chimeric intron, optionally a cloning site exemplified by SEQ ID NO: 156, an eGFP coding region exemplified by SEQ ID NO: 103, optionally a cloning site exemplified by SEQ ID NO: 157, three copies of microRNA backbone and KCNQ4 targeting sequence exemplified by SEQ ID NO: 138, optionally a cloning site exemplified by SEQ ID NO: 158, a polyA site exemplified by SEQ ID NO: 36, optionally a cloning site exemplified by SEQ ID NO: 159, and a 3′ ITR exemplified by SEQ ID NO: 18.

[0373] In one embodiment, an exemplary construct comprises: a 5′ ITR exemplified by SEQ ID NO: 19, optionally a cloning site exemplified by SEQ ID NO: 155, a CMV enhancer exemplified by SEQ ID NO: 22, a CBA promoter exemplified by SEQ ID NO: 101, a chimeric intron exemplified by SEQ ID NO: 102 with three copies of human microRNA backbone and mouse KCNQ4 targeting sequence exemplified by SEQ ID NO: 139 engineered into the chimeric intron, optionally a cloning site exemplified by SEQ ID NO: 156, an eGFP coding region exemplified by SEQ ID NO: 103, optionally a cloning site exemplified by SEQ ID NO: 157, three copies of microRNA backbone and KCNQ4 targeting sequence exemplified by SEQ ID NO: 138, optionally a cloning site exemplified by SEQ ID NO: 158, a polyA site exemplified by SEQ ID NO: 36, optionally a cloning site exemplified by SEQ ID NO: 159, and a 3′ ITR exemplified by SEQ ID NO: 18.

[0374] In one embodiment, an exemplary construct comprises: a 5′ ITR exemplified by SEQ ID NO: 19, optionally a cloning site exemplified by SEQ ID NO: 155, a CMV enhancer exemplified by SEQ ID NO: 22, a CBA promoter exemplified by SEQ ID NO: 101, a chimeric intron exemplified by SEQ ID NO: 102 with a human microRNA backbone and mouse KCNQ4 targeting sequence exemplified by SEQ ID NO: 136 engineered into the chimeric intron, optionally a cloning site exemplified by SEQ ID NO: 156, an KCNQ4 coding region exemplified by SEQ ID NO: 10, optionally a cloning site exemplified by SEQ ID NO: 157, three copies of microRNA backbone and KCNQ4 targeting sequence exemplified by SEQ ID NO: 138, optionally a cloning site exemplified by SEQ ID NO: 158, a polyA site exemplified by SEQ ID NO: 36, optionally a cloning site exemplified by SEQ ID NO: 159, and a 3′ ITR exemplified by SEQ ID NO: 18.

[0375] In one embodiment, an exemplary construct comprises: a 5′ ITR exemplified by SEQ ID NO: 19, optionally a cloning site exemplified by SEQ ID NO: 155, a CMV enhancer exemplified by SEQ ID NO: 22, a CBA promoter exemplified by SEQ ID NO: 101, a chimeric intron exemplified by SEQ ID NO: 102 with three copies of human microRNA backbone and mouse KCNQ4 targeting sequence exemplified by SEQ ID NO: 139 engineered into the chimeric intron, optionally a cloning site exemplified by SEQ ID NO: 156, an KCNQ4 coding region exemplified by SEQ ID NO: 10, optionally a cloning site exemplified by SEQ ID NO: 157, three copies of microRNA backbone and KCNQ4 targeting sequence exemplified by SEQ ID NO: 138, optionally a cloning site exemplified by SEQ ID NO: 158, a polyA site exemplified by SEQ ID NO: 36, optionally a cloning site exemplified by SEQ ID NO: 159, and a 3′ ITR exemplified by SEQ ID NO: 18.

Codon Optimized KCNQ4 with sgRNA Construct Sequences

[0376] In one embodiment, an exemplary construct comprises: a 5′ ITR exemplified by SEQ ID NO: 19, optionally a cloning site exemplified by SEQ ID NO: 155, a CMV enhancer exemplified by SEQ ID NO: 22, a chicken B-actin promoter exemplified by SEQ ID NO: 101, a chimeric intron exemplified by SEQ ID NO: 24, optionally a cloning site exemplified by SEQ ID NO: 156, an KCNQ4 coding region exemplified by SEQ ID NO: 9, optionally a cloning site exemplified by SEQ ID NO: 221, a bGH poly(A) signal exemplified by SEQ ID NO: 36, a U6 promoter sequence exemplified by SEQ ID NO: 144, a guide RNA sequence exemplified by SEQ ID NO: 42, a tracrRNA sequence exemplified by SEQ ID NO: 147, a Pol III transcription termination sequence exemplified by SEQ ID NO: 149, and a 3′ ITR exemplified by SEQ ID NO: 20.

[0377] In one embodiment, an exemplary construct comprises: a 5′ ITR exemplified by SEQ ID NO: 19, optionally a cloning site exemplified by SEQ ID NO: 155, a CMV enhancer exemplified by SEQ ID NO: 22, a chicken B-actin promoter exemplified by SEQ ID NO: 101, a chimeric intron exemplified by SEQ ID NO: 24, optionally a cloning site exemplified by SEQ ID NO: 156, an KCNQ4 coding region exemplified by SEQ ID NO: 9, optionally a cloning site exemplified by SEQ ID NO: 221, a bGH poly(A) signal coding region exemplified by SEQ ID NO: 36, a U6 promoter sequence exemplified by SEQ ID NO: 144, a guide RNA sequence exemplified by SEQ ID NO: 150, a tracrRNA sequence exemplified by SEQ ID NO: 147, a Pol III transcription termination sequence exemplified by SEQ ID NO: 149, and a 3′ ITR exemplified by SEQ ID NO: 20.

### Exemplary Construct Component Sequences

Exemplary miRNA Construct Sequences

[0378] Exemplary miRNA construct sequences may be or comprise a sequence according to SEQ ID NOs. 172-254.

Exemplary hKCNQ4 Codon Optimized to Resist microRNA Construct Sequences

[0379] Exemplary hKCNQ4 codon optimized to resist microRNA construct sequences may be or comprise a sequence according to SEQ ID NO: 255.

### Exemplary Wildtype KCNQ4 Construct Sequences

[0380] Exemplary wildtype KCNQ4 construct sequences may be or comprise a sequence according to SEQ ID NOs. 256-257.

### Exemplary U6shRNA-hKCNQ4 Construct Sequences

[0381] Exemplary U6shRNA-hKCNQ4 construct sequences may be or comprise a sequence according to SEQ ID NOs. 258-266.

Exemplary hKCNQ4 Codon Optimized to Resist CRISPR, Some with sgRNA Construct Sequences

[0382] Exemplary hKCNQ4 codon optimized to resist CRISPR, some with sgRNA construct sequences, may be or comprise a sequence according to SEQ ID NOs. 267-275.

### Exemplary Base Cas9 Plasmids

[0383] Exemplary base Cas9 plasmids may be or comprise a sequence according to SEQ ID NOs. 276-280.

Exemplary Cas9 with GFP and sgRNA Plasmids

[0384] Exemplary Cas9 with GFP and sgRNA plasmids may be or comprise a sequence according to SEQ ID NOs. 281-288.

Exemplary eGFP with sgRNA Plasmids

[0385] Exemplary eGFP with sgRNA plasmids may be or comprise a sequence according to SEQ ID NOs. 289-291.

### Additional Exemplary Constructs

### Additional Exemplary Constructs Described by the Present Disclosure May be or Comprise a Sequence According to SEQ ID NOs. 332-355.

Xxi. AAV Particles

[0386] Among other things, the present disclosure provides AAV particles that comprise a construct encoding a KCNQ4 gene or characteristic portion thereof and/or an inhibitory nucleic acid sequence as described herein, and a capsid described herein. In some embodiments, AAV particles can be described as having a serotype, which is a description of a construct strain (e.g., serotype of viral components, e.g., ITRs), and a capsid strain. For example, in some embodiments an AAV particle may be described as AAV2, wherein the particle has an AAV2 capsid and a construct that comprises characteristic AAV2 Inverted Terminal Repeats (ITRs). In some embodiments, an AAV particle may be described as a pseudotype, wherein a capsid and construct are derived from different AAV strains, for example, AAV2/9 would refer to an AAV particle that comprises a construct utilizing AAV2 ITRs and an AAV9 capsid. In some embodiments, an AAV particle is described as Anc80, wherein a particle has an Anc80 capsid and AAV2 ITRs. In some embodiments, a construct may be described, e.g., as provided herein, without specific mention of a serotype of, e.g., an ITR in the name of the construct; however, it will be evident to one of skill in the art, reading the disclosure, what type of ITR is present in a given construct, e.g., AAV2 ITR. In some embodiments, an AAV particle of the present disclosure comprises at least one construct, which construct can be or comprise any sequence disclosed herein.

e. KCNQ4 Genome Editing

[0387] In some embodiments, a genome editing system targets nucleotides within a specific target site. In some such embodiments, a target site is or comprises a loss-of-function KCNQ4 variant sequence.

[0388] In some embodiments, a genome editing system comprises a nucleic acid strand that is complementary to a target site in a KCNQ4 gene product (e.g., complementary to a nucleotide sequence that is at least 85%, 90%, 91%, 92%, 93%, 94%, 95%, 96%, 97%, 98%, 99%, or 100% identical to a portion of any of SEQ ID NOs: 1-10 and/or 25-30 and/or 90-91) or a characteristic portion thereof. In some embodiments, a target site may be 15-30 nucleotides long, e.g., 15, 16, 17, 18, 19, 20, 21, 22, 23, 24, 25, 26, 27, 28, 29, or 30 nucleotides long, although shorter and longer target sites are also contemplated.

[0389] In some embodiments, a genome editing system comprises a nucleic acid strand that comprises a region that is perfectly complementary to at least 6, 7, 8, 9, 10, 11, 12, 13 14, 15, 16, 17, 18, 19, 20, 21, 22, 23, 24, 25, 26, 27, 28, 29, or 30 consecutive nucleotides of a KCNQ4 gene product. In some embodiments, a KCNQ gene product is or comprises any of SEQ ID NOs: 1-10 and/or 25-30 and/or 90-91 or a characteristic portion thereof). In some embodiments such an RNA-guided nuclease system is capable of inhibiting expression of KCNQ4 of one or more non-human species, e.g., a non-human primate KCNQ4, e.g., Macaca fascicularis KCNQ4, in addition to human KCNQ4. The Macaca fascicularis KCNQ4 gene has been assigned NCBI Gene ID: 102143586 and predicted amino acid and nucleotide sequences of Macaca fascicularis KCNQ4 are listed under NCBI RefSeq accession numbers XP_005543852 and XM_005543795.2, respectively.

[0390] In some embodiments, a genome editing system is complementary to a target site that is identical in human and Macaca fascicularis KCNQ4 transcripts. In some embodiments, a genome editing system is complementary to a target site of a human KCNQ4 transcript that differs by 1, 2, or 3 nucleotides from a sequence in a Macaca fascicularis KCNQ4 transcript. It will be appreciated that a genome editing system that targets human KCNQ4 may also target non-primate KCNQ4, e.g., rat or mouse KCNQ4, particularly if conserved regions of KCNQ4 transcript are targeted.

i. RNA-Guided Nucleases

[0391] RNA-guided nucleases according to the present disclosure include, but are not limited to, naturally-occurring Class 2 CRISPR nucleases such as Cas9, and Cpf1, as well as other nucleases derived or obtained therefrom. In functional terms, RNA-guided nucleases are defined as those nucleases that: (a) interact with (e.g., complex with) a gRNA; and (b) together with gRNA, associate with, and optionally cleave or modify, a target region of a DNA that includes (i) a sequence complementary to a targeting domain of a gRNA and, optionally, (ii) an additional sequence referred to as a “protospacer adjacent motif,” or “PAM,” which is described in greater detail herein.

[0392] Naturally occurring CRISPR systems are organized evolutionarily into two classes and five types (Makarova et al. Nat Rev Microbiol. 2011 June; 9(6): 467-477 (“Makarova”), which is incorporated in its entirety herein by reference), and while genome editing systems of the present disclosure may adapt components of any type or class of naturally occurring CRISPR system, embodiments presented herein are generally adapted from Class 2, and type II or V CRISPR systems. Class 2 systems, which encompass types II and V, are characterized by relatively large, multidomain CRISPR proteins (e.g., Cas9 or Cpf1) and one or more gRNAs (e.g., a crRNA and, optionally, a tracrRNA) that form ribonucleoprotein (RNP) complexes that associate with (i.e., target) and cleave specific loci complementary to a targeting (or spacer) sequence of a crRNA. Genome editing systems according to the present disclosure similarly target and edit cellular DNA sequences, but differ significantly from CRISPR systems occurring in nature. For example, unimolecular gRNAs described herein do not occur in nature, and both gRNAs and CRISPR nucleases according to this disclosure may incorporate any number of non-naturally occurring modifications.

[0393] As described herein, it should be noted that a genome editing systems of the present disclosure can be targeted to a single specific nucleotide sequence, or may be targeted to—and capable of editing in parallel—two or more specific nucleotide sequences through use of two or more gRNAs. In some embodiments, use of multiple gRNAs is referred to as “multiplexing.” As described herein, multiplexing can be employed, for example, to target multiple, unrelated target sequences of interest, or to form multiple SSBs or DSBs within a single target domain and, in some cases, to generate specific edits within such target domain. For example, International Patent Publication No. WO 2015/138510 by Maeder et al., which is incorporated in its entirety herein by reference; (“Maeder”) describes a genome editing system for correcting a point mutation (C.2991+1655A to G) in human CEP290 that results in t creation of a cryptic splice site, which in turn reduces or eliminates function of the gene. That genome editing system of Maeder utilizes two gRNAs targeted to sequences on either side of (i.e., flanking) the point mutation, and forms DSBs that flank the mutation. This, in turn, promotes deletion of the intervening sequence, including the mutation, thereby eliminating the cryptic splice site and restoring normal gene function.

[0394] As another example, WO 2016/073990 by Cotta-Ramusino, et al. (“Cotta-Ramusino”), which is incorporated in its entirety herein by reference. Cotta-Ramusino describes a genome editing system that utilizes two gRNAs in combination with a Cas9 nickase (a Cas9 that makes a single strand nick such as S. pyogenes D10A), an arrangement termed a “dual-nickase system.” The dual-nickase system of Cotta-Ramusino is configured to make two nicks on opposite strands of a sequence of interest that are offset by one or more nucleotides, which nicks combine to create a double strand break having an overhang (5′ in the case of Cotta-Ramusino, though 3′ overhangs are also possible). The overhang, in turn, can facilitate homology directed repair events in some circumstances. And, as another example, WO 2015/070083 by Palestrant et al., which is incorporated in its entirety herein by reference; (“Palestrant”) describes a gRNA targeted to a nucleotide sequence encoding Cas9 (referred to as a “governing RNA”), which can be included in a genome editing system comprising one or more additional gRNAs to permit transient expression of a Cas9 that might otherwise be constitutively expressed, for example in some virally transduced cells. These multiplexing applications are intended to be exemplary, rather than limiting, and the skilled artisan will appreciate that other applications of multiplexing are generally compatible with the genome editing systems described here.

[0395] Genome editing systems can, in some instances, form double strand breaks that are repaired by cellular DNA double-strand break mechanisms such as NHEJ or HDR. These mechanisms are described throughout the literature, for example by Davis & Maizels, PNAS, 111(10):E924-932, Mar. 11, 2014, which is incorporated in its entirety herein by reference (“Davis”) (describing Alt-HDR); Frit et al. DNA Repair 17(2014) 81-97, which is incorporated in its entirety herein by reference (“Frit”) (describing Alt-NHEJ); and Iyama and Wilson III, DNA Repair (Amst.) 2013-August; 12(8): 620-636, which is incorporated in its entirety herein by reference (“Iyama”) (describing canonical HDR and NHEJ pathways generally).

[0396] Where genome editing systems operate by forming DSBs, such systems optionally include one or more components that promote or facilitate a particular mode of double-strand break repair or a particular repair outcome. For instance, Cotta-Ramusino also describes genome editing systems in which a single stranded oligonucleotide “donor template” is added; a donor template is incorporated into a target region of cellular DNA that is cleaved by a genome editing system, and can result in a change in a target sequence.

[0397] In some embodiments, genome editing systems modify a target sequence, or modify expression of a gene in or near a target sequence, without causing single- or double-strand breaks. For example, a genome editing system may include a CRISPR protein fused to a functional domain that acts on DNA, thereby modifying a target sequence or its expression. As one example, a CRISPR protein can be connected to (e.g., fused to) a cytidine deaminase functional domain, and may operate by generating targeted C-to-A substitutions. Exemplary nuclease/deaminase fusions are described in Komor et al. Nature 533, 420-424 (19 May 2016) (“Komor”), which is incorporated in its entirety herein by reference. In some embodiments, a genome editing system may utilize a cleavage-inactivated (i.e., a “dead”) nuclease, such as a dead Cas9 (dCas9), and may operate by forming stable complexes on one or more targeted regions of cellular DNA, thereby interfering with functions involving a targeted region(s) including, without limitation, mRNA transcription, chromatin remodeling, etc. In some embodiments, a genome editing system may be self-inactivating to improve a safety profile, as described by Li et al. “A Self-Deleting AAV-CRISPR System for In vivo Editing” Mol Ther Methods Clin Dev. 2019 Mar. 15; 12: 111-122; published online (2018 Dec. 6), the contents of which are hereby incorporated by reference in its entirety.

[0398] As the following examples will illustrate, RNA-guided nucleases can be defined, in broad terms, by their PAM specificity and cleavage activity, even though variations may exist between individual RNA-guided nucleases that share the same PAM specificity or cleavage activity. Skilled artisans will appreciate that some aspects of the present disclosure relate to systems, methods and compositions that can be implemented using any suitable RNA-guided nuclease having a certain PAM specificity and/or cleavage activity. For this reason, unless otherwise specified, the term RNA-guided nuclease should be understood as a generic term, and not limited to any particular type (e.g., Cas9 vs. Cpf1), species (e.g., S. pyogenes vs. S. aureus, etc.) or variation (e.g., full-length vs. truncated or split; naturally-occurring PAM specificity vs. engineered PAM specificity, etc.) of RNA-guided nuclease. In some embodiments, a CRISPR/Cas is derived from a type II CRISPR/Cas system. In some embodiments, a CRISPR/Cas system is derived from a Cas9 protein. A Cas9 protein can be from Streptococcus pyogenes, Streptococcus thermophilus, Staphylococcus aureus, Campylobacter jejuni, or other species. In some embodiments, Cas9 can include: spCas9, Cpf1, CasY, CasX, saCas9, or CjCas9.

[0399] Administering bacterial Cas9 in humans presents immunogenicity concerns. Therefore, it is important to develop a codon-optimized CRISPR system as described herein to reduce immunogenicity. In addition, some other limitations include a need to use a two construct system (instead of a single construct system such that is used in shRNA and miRNA protocols), and determination of off-target risk (e.g., even if using dCas9 to reduce expression of KCNQ4, there may be repression of other targets besides from KCNQ4)

[0400] A PAM sequence takes its name from its sequential relationship to a “protospacer” sequence that is complementary to gRNA targeting domains (or “spacers”). Together with protospacer sequences, PAM sequences define target regions or sequences for specific RNA-guided nuclease/gRNA combinations.

[0401] Various RNA-guided nucleases may require different sequential relationships between PAMs and protospacers. In general, Cas9s recognize PAM sequences that are 3′ of a protospacer. Cpf1, on the other hand, generally recognizes PAM sequences that are 5′ of a protospacer.

[0402] In addition to recognizing specific sequential orientations of PAMs and protospacers, RNA-guided nucleases can also recognize specific PAM sequences. S. aureus Cas9, for instance, recognizes a PAM sequence of NNGRRT or NNGRRV, wherein the N residues are immediately 3′ of the region recognized by the gRNA targeting domain. S. pyogenes Cas9 recognizes NGG PAM sequences. And F. novicida Cpf1 recognizes a TTN PAM sequence. PAM sequences have been identified for a variety of RNA-guided nucleases, and a strategy for identifying novel PAM sequences has been described by Shmakov et al., 2015, Molecular Cell 60, 385-397, Nov. 5, 2015. It should also be noted that engineered RNA-guided nucleases can have PAM specificities that differ from PAM specificities of reference molecules (for instance, in the case of an engineered RNA-guided nuclease, a reference molecule may be a naturally occurring variant from which an RNA-guided nuclease is derived, or a naturally occurring variant having the greatest amino acid sequence homology to an engineered RNA-guided nuclease).

[0403] In addition to their PAM specificity, RNA-guided nucleases can be characterized by their DNA cleavage activity: naturally-occurring RNA-guided nucleases typically form DSBs in target nucleic acids, but engineered variants have been produced that generate only SSBs (discussed above) Ran & Hsu, et al., Cell 154(6), 1380-1389, Sep. 12, 2013 (“Ran”)), or that that do not cut at all.

### Crispr Fusion Proteins

[0404] As described herein, in some embodiments, a CRISPR nuclease is part of a fusion protein comprising one or more heterologous protein domains (e.g., about or more than about 1, 2, 3, 4, 5, 6, 7, 8, 9, 10, or more domains in addition to a CRISPR nuclease). A CRISPR nuclease fusion protein may comprise any additional protein sequence, and optionally a linker sequence between any two domains. Examples of protein domains that may be fused to a CRISPR nuclease include, without limitation, epitope tags, reporter gene sequences, and protein domains having one or more of the following activities: methylase activity, demethylase activity, transcription activation activity, transcription repression activity, transcription release factor activity, histone modification activity, RNA cleavage activity and nucleic acid binding activity. Additional domains that may form part of a fusion protein comprising a CRISPR nuclease are described in US20110059502, incorporated herein by reference. In some embodiments, a tagged CRISPR nuclease is used to identify a location of a target sequence. In some embodiments, a CRISPR nuclease that is part of a fusion protein has been engineered to produce only SSBs as described herein. In some embodiments, a CRISPR nuclease that is part of a fusion protein has been engineered to not cut at all as described herein.

### Crispr Variants

[0405] In general, RNA-guided nucleases comprise at least one RNA recognition and/or RNA binding domain. RNA recognition and/or RNA binding domains interact with a guiding RNA. CRISPR/Cas proteins can also comprise nuclease domains (i.e., DNase or RNase domains), DNA binding domains, helicase domains, RNAse domains, protein-protein interaction domains, dimerization domains, as well as other domains. RNA-guided nucleases can be modified to increase nucleic acid binding affinity and/or specificity, alter an enzymatic activity, and/or change another property of a protein. In some embodiments, a CRISPR/Cas-like protein of a fusion protein can be derived from a wild type Cas9 protein or fragment thereof. In other embodiments, a CRISPR/Cas can be derived from modified Cas9 protein. For example, an amino acid sequence of a Cas9 protein can be modified to alter one or more properties (e.g., nuclease activity, affinity, stability, and so forth) of a protein. Alternatively, domains of a Cas9 protein not involved in RNA-guided cleavage can be eliminated from a protein such that a modified Cas9 protein is smaller than a wild type Cas9 protein. In general, a Cas9 protein comprises at least two nuclease (i.e., DNase) domains. For example, a Cas9 protein can comprise a RuvC-like nuclease domain and a HNH-like nuclease domain. RuvC and HNH domains work together to cut single strands to make a double-stranded break in DNA (Jinek et al., 2012, Science, 337:816-821, which is incorporated in its entirety herein by reference).

[0406] In some embodiments, a Cas9-derived protein can be modified to contain only one functional nuclease domain (either a RuvC-like or a HNH-like nuclease domain). For example, a Cas9-derived protein can be modified such that one nuclease domain is deleted or mutated such that it is no longer functional (i.e., nuclease activity is absent). In some embodiments in which one nuclease domains is inactive, a Cas9-derived protein is able to introduce a nick into a double-stranded nucleic acid (such protein is termed a “nickase”), but not cleave double-stranded DNA. In any of the above-described embodiments, any or all of nuclease domains can be inactivated by one or more deletion mutations, insertion mutations, and/or substitution mutations using well-known methods, such as site-directed mutagenesis, PCR-mediated mutagenesis, and total gene synthesis, as well as other methods known in the art.

[0407] One example of a CRISPR/Cas9 system used to inhibit gene expression, CRISPRi, is described in U.S. Publication No. US2014/0068797, which is incorporated herein by reference in its entirety. CRISPRi induces permanent gene disruption that utilizes the RNA-guided Cas9 endonuclease to introduce DNA double stranded breaks which trigger error-prone repair pathways to result in frame shift mutations. A catalytically dead Cas9 lacks endonuclease activity. When coexpressed with a gRNA, a DNA recognition complex is generated that specifically interferes with transcriptional elongation, RNA polymerase binding, or transcription factor binding. This CRISPRi system efficiently represses expression of targeted genes.

ii. Guide RNAs (gRNAs)
gRNA Sequence Selection

[0408] A gRNA sequence may be specific for any gene, such as a gene that would affect (e.g., ameliorate, improve, attenuate, mitigate) hearing loss. In some embodiments, a gene encodes an ion channel subunit. In some such embodiments, a gene is KCNQ4. In some embodiments, a gRNA sequence includes an RNA sequence, a DNA sequence, a combination thereof (a RNA-DNA combination sequence), or a sequence with synthetic nucleotides. A gRNA sequence can be a single molecule or a double molecule. In one embodiment, a gRNA sequence comprises a single guide RNA (sgRNA).

[0409] In some embodiments, a gRNA sequence is specific for a gene and targets that gene for Cas endonuclease-induced double strand breaks. A sequence of a gRNA may be within a loci of the gene. In one embodiment, a gRNA sequence is at least 10, 11, 12, 13, 14, 15, 16, 17, 18, 19, 20, 21, 22, 23, 24, 25, 26, 27, 30, 31, 32, 33, 34, 35, 36, 37, 38, 39, 40 or more nucleotides in length. In some embodiments, a gRNA sequence is from about 18 to about 22 nucleotides in length.

[0410] As described herein, in some embodiments in the context of formation of a CRISPR complex, “target sequence” refers to a sequence to which a guide sequence is designed to have some complementarity, where hybridization between a target sequence and a guide sequence promotes formation of a CRISPR complex. Full complementarity is not necessarily required, provided there is sufficient complementarity to cause hybridization and promote formation of a CRISPR complex. A target sequence may comprise any polynucleotide, such as DNA or RNA polynucleotides. In some embodiments, a target sequence is located in the nucleus or cytoplasm of a cell. In other embodiments, a target sequence may be within an organelle of a eukaryotic cell, for example, mitochondrion or nucleus. Typically, in the context of an endogenous CRISPR system, formation of a CRISPR complex (comprising a guide sequence hybridized to a target sequence and complexed with one or more Cas proteins) results in cleavage of one or both strands in or near (e.g., within about 1, 2, 3, 4, 5, 6, 7, 8, 9, 10, 20, 50 or more base pairs) a target sequence. As with a target sequence, it is believed that complete complementarity is not needed, provided this is sufficient to be functional. In some embodiments, a tracr sequence has at least 50%, 60%, 70%, 80%, 90%, 95% or 99% of sequence complementarity along the length of a tracr mate sequence when optimally aligned.

[0411] In some embodiments, a gRNA sequence targets a KCNQ4 gene.

TABLE 2
Exemplary gRNA Sequences

| Sequence Number | Name |
|---|---|
| SEQ ID NO: 42 | guide RNA # 386Fw |
| SEQ ID NO: 43 | guide RNA # 408Rev |
| SEQ ID NO: 44 | guide RNA # 233Fw |
| SEQ ID NO: 45 | guide RNA # 447Fw |
| SEQ ID NO: 46 | guide RNA # 482Fw |
| SEQ ID NO: 47 | guide RNA # 490Fw |

gRNA Design

[0412] Methods for selection and validation of target sequences as well as off-target analyses have been described previously, e.g., in Mali; Hsu; Fu et al., 2014 Nat biotechnol 32(3): 279-84, Heigwer et al., 2014 Nat methods 11(2):122-3; Bae et al. (2014) Bioinformatics 30(10): 1473-5; and Xiao A et al. (2014) Bioinformatics 30(8): 1180-1182, each of which is incorporated in its entirety herein by reference. As a non-limiting example, gRNA design may involve use of a software tool to optimize choice of potential target sequences corresponding to a user's target sequence, e.g., to minimize total off-target activity across a genome. While off-target activity is not limited to cleavage, cleavage efficiency at each off-target sequence can be predicted, e.g., using an experimentally-derived weighting scheme. These and other guide selection methods are described in detail in Maeder and Cotta-Ramusino.

[0413] For example, methods for selection and validation of target sequences as well as off-target analyses can be performed using cas-offinder (Bae S, Park J, Kim J-S. Cas-OFFinder: a fast and versatile algorithm that searches for potential off-target sites of Cas9 RNA-guided endonucleases. Bioinformatics. 2014; 30:1473-5, which is incorporated in its entirety herein by reference). Cas-offinder is a tool that can quickly identify all sequences in a genome that have up to a specified number of mismatches to a guide sequence.

[0414] As another example, methods for scoring how likely a given sequence is to be an off-target (e.g., once candidate target sequences are identified) can be performed. An exemplary score includes a Cutting Frequency Determination (CFD) score, as described by Doench J G, Fusi N, Sullender M, Hegde M, Vaimberg E W, Donovan K F, et al. Optimized sgRNA design to maximize activity and minimize off-target effects of CRISPR-Cas9. Nat Biotechnol. 2016; 34:184-91, which is incorporated in its entirety herein by reference.

gRNA Modifications

[0415] Activity, stability, or other characteristics of gRNAs can be altered through incorporation of certain modifications. As one example, transiently expressed or delivered nucleic acids can be prone to degradation by, e.g., cellular nucleases. Accordingly, gRNAs described herein can contain one or more modified nucleosides or nucleotides that can introduce stability toward nucleases. While not wishing to be bound by theory, it is also believed that certain modified gRNAs described herein can exhibit a reduced innate immune response when introduced into cells. Those of skill in the art will be aware of certain cellular responses commonly observed in cells, e.g., mammalian cells, in response to exogenous nucleic acids, particularly those of viral or bacterial origin. Such responses, which can include induction of cytokine expression and release and cell death, may be reduced or eliminated altogether by modifications presented herein.

[0416] Certain exemplary modifications discussed in this section can be included at any position within a gRNA sequence including, without limitation at or near its 5′ end (e.g., within 1-10, 1-5, or 1-2 nucleotides of a 5′ end) and/or at or near its 3′ end (e.g., within 1-10, 1-5, or 1-2 nucleotides of a 3′ end). In some cases, modifications are positioned within functional motifs, such as a repeat-anti-repeat duplex of a Cas9 gRNA, a stem loop structure of a Cas9 or Cpf1 gRNA, and/or a targeting domain of a gRNA. Others types of modified nucleobases are described herein.

f. KCNQ4 Knockdown

[0417] The present disclosure provides technologies (e.g., comprising compositions) that may, in some embodiments, reduce, suppress or otherwise decrease (“knock down”) expression of one or more gene products. For example, in some embodiments, technologies of the present disclosure may achieve knockdown of a KCNQ4 gene product (e.g., a KCNQ4 gene, mRNA, protein, etc.). In some embodiments, a KCNQ4 gene product may be a wild-type KCNQ4 or may have one or more mutations relative to a wild-type sequence, e.g., a loss-of-function KCNQ4 variant.

[0418] In some embodiments, knockdown of a KCNQ4 gene product (e.g., a KCNQ4 gene, mRNA, protein, etc.) is achieved using one or more techniques to inhibit one or more gene products or processes by which gene products are produced. For example, in some embodiments, the present disclosure provides technologies that comprise compositions that are or comprise inhibitory nucleic acid molecules to knock down expression of a gene product (e.g., a KCNQ4 gene product).

[0419] In some embodiments, an inhibitory nucleic acid molecule targets nucleotides within a KCNQ4 gene product.

[0420] In some embodiments, an inhibitory nucleic acid molecule comprises a nucleic acid strand that is complementary to a target site of a KCNQ4 gene product, e.g., KCNQ4 mRNA (e.g., complementary to a nucleotide sequence that is at least 85%, 90%, 91%, 92%, 93%, 94%, 95%, 96%, 97%, 98%, 99%, or 100% identical to a portion of SEQ ID NOs: 1-10 and/or 25-30 and/or 90-91). In some embodiments, a target site may be 15-30 nucleotides long, e.g., 15, 16, 17, 18, 19, 20, 21, 22, 23, 24, 25, 26, 27, 28, 29, or 30 nucleotides long, although shorter and longer target sites are also contemplated.

[0421] In some embodiments, an inhibitory nucleic acid molecule comprises a nucleic acid strand that comprises a region that is perfectly complementary to at least 6, 7, 8, 9, 10, 11, 12, 13 14, 15, 16, 17, 18, 19, 20, 21, 22, 23, 24, 25, 26, 27, 28, 29, or 30 consecutive nucleotides of any of SEQ ID NOs:1-10 or 25-30 or 90-91 or characteristic portions thereof).

[0422] In some embodiments an inhibitory nucleic acid molecule is capable of inhibiting expression of a KCNQ4 gene product of one or more non-human species, e.g., a non-human primate KCNQ4, e.g., Macaca fascicularis KCNQ4, in addition to human KCNQ4. A Macaca fascicularis KCNQ4 gene has been assigned NCBI Gene ID: 102143586 and predicted amino acid and nucleotide sequences of Macaca fascicularis KCNQ4 are listed under NCBI RefSeq accession numbers XP_005543852.2 and XM_005543795.2, respectively. In some embodiments, an inhibitory RNA molecule or Genome editing system is complementary to a target portion that is identical in human and Macaca fascicularis KCNQ4 transcripts. In some embodiments, an inhibitory RNA molecule is complementary to a target site of a human KCNQ4 transcript that differs by 1, 2, or 3 nucleotides from a sequence in a Macaca fascicularis KCNQ4 transcript. It will be appreciated that an inhibitory RNA molecule that inhibits expression of human KCNQ4 gene product may also inhibit expression of non-primate KCNQ4, e.g., rat or mouse KCNQ4, particularly if conserved regions of KCNQ4 transcript are targeted.

i. Inhibitory Nucleic Acid Molecules

[0423] RNA interference (RNAi) is a process of sequence-specific post-transcriptional gene silencing by which, e.g., double stranded RNA (dsRNA) homologous to a target locus can specifically inactivate gene function (Hammond et al., Nature Genet. 2001; 2:110-119; Sharp, Genes Dev. 1999; 13:139-141). For example, positional location of shRNAs targeting intronic-3XmiR, polyA-3XmiR, or both intronic-3XmiR and PolyA-3XmiR reduced PIZ serum level (% knockdown as compared to GFP control) (Mueller et al 2012). As described herein, positional impacts of miRNAs are tested and evaluated. In some embodiments, dsRNA-induced gene silencing can be mediated by short double-stranded small interfering RNAs (siRNAs) generated from longer dsRNAs by ribonuclease III cleavage (Bernstein et al., Nature 2001; 409:363-366 and Elbashir et al., Genes Dev. 2001; 15:188-200). Without being bound by any particular theory, RNAi-mediated gene silencing is thought to occur via sequence-specific RNA degradation, where sequence specificity is determined by interaction of a siRNA with its complementary sequence within a target RNA (see, e.g., Tuschl, Chem. Biochem. 2001; 2:239-245). In some embodiments, RNAi can involve use of, e.g., siRNAs (Elbashir, et al., Nature 2001; 411: 494-498, which is incorporated in its entirety herein by reference) or short hairpin RNAs (shRNAs) bearing a fold back stem-loop structure (Paddison et al., Genes Dev. 2002; 16: 948-958; Sui et al., Proc. Natl. Acad. Sci. USA 2002; 99:5515-5520; Brummelkamp et al., Science 2002; 296:550-553; Paul et al., Nature Biotechnol. 2002; 20:505-508, each of which is incorporated in its entirety herein by reference).

[0424] In some embodiments, an inhibitory nucleic acid molecule is designed on a patient-by-patient basis in accordance with the present disclosure. For example, in some embodiments, a patient with a history (e.g., parent or symptoms of hearing loss) of hearing loss or at risk of hearing loss may be evaluated (e.g., have samples diagnostically analyzed) for one or more variants (e.g., substitutions, additions, deletions, etc.) in one or more genes. In some such embodiments, identified variants (e.g., mutations) may be novel (i.e., not previously described in the literature), and inhibitory nucleic acid therapeutics will be personalized to variant(s) (e.g., mutation(s)) of a particular patient.

[0425] In some embodiments an inhibitory nucleic acid is one or more of a short interfering RNA (siRNA), a short hairpin RNA (shRNA), an antisense oligonucleotide, or a ribozyme. In some embodiments, knockdown of KCNQ4 expression is achieved via inhibitory nucleic acids that target a KCNQ4 sequence as described herein. In some such embodiments, a targeted KCNQ4 sequence may be a wild-type and/or pathogenic KCNQ4 variant gene product.

[0426] In some embodiments, an inhibitory nucleic acid of the present disclosure may be used to decrease expression of a KCNQ4 gene product (e.g., a loss-of-function KCNQ4 variant gene product). In some such embodiments, a construct encodes an inhibitory nucleic acid that may, in some embodiments, decrease expression of a KCNQ4 gene product, e.g., in a human cell (e.g., a hair cell, e.g., an outer hair cell). Non-limiting examples of siRNAs that can decrease expression of a KCNQ4 gene product, e.g., in a human cell (e.g., a hair cell, e.g., an outer hair cell) are provided herein. In some embodiments, after an inhibitory nucleic acid is used to decrease expression of a loss-of-function KCNQ4 variant gene product, another (i.e., non-inhibitory) nucleic acid molecule may be used to express functional KCNQ4 protein. The present disclosure recognizes that, in some such embodiments, it is contemplated that wild-type or other functional (e.g., codon-optimized) KCNQ4 gene products may be vulnerable to miRNA degradation. Accordingly, in some such embodiments, a KCNQ4 sequence that is used to express a functional KCNQ4 gene product may be a codon-optimized KCNQ4 sequence.

siRNA or shRNA

[0427] In some embodiments, the present disclosure provides an inhibitory nucleic acid e, e.g., a chemically-modified siRNAs or a construct-driven expression of short hairpin RNA (shRNA) that are then cleaved to siRNA, e.g., within a cell. Accordingly, one of skill in the art will understand that, for purposes of sequences, an shRNA sequence is interchangeable with an siRNA sequence and that where the disclosure refers to an siRNA, an shRNA sequence may be used since the shRNA will be cleaved into siRNA. For example, in some embodiments, an inhibitory nucleic acid can be a dsRNA (e.g., siRNA) including 16-30 nucleotides, e.g., 16, 17, 18, 19, 20, 21, 22, 23, 24, 25, 26, 27, 28, 29, or 30 nucleotides in each strand, where one strand is substantially identical, e.g., at least 80% (or more, e.g., 85%, 90%, 95%, or 100%) identical, e.g., having 3, 2, 1, or 0 mismatched nucleotide(s), to a target region in a potassium-channel (e.g., Kv7.4) encoding mRNA, and the other strand is complementary to the first strand. In some embodiments, dsRNA molecules can be designed using methods known in the art, e.g., Dharmacon.com (see, siDESIGN CENTER) or “The siRNA User Guide,” available on the Internet at mpibpc.gwdg.de/abteilungen/100/105/sirna.html website which is incorporated in its entirety herein by reference. Without being bound by any particular theory, the present disclosure contemplates that siRNA or shRNAs are more “endogenous” (e.g., no foreign proteins) in a way that may be more recognizable to a cell compared to other available techniques that will be known to those of skill in the art. Accordingly, in some embodiments, siRNA or shRNA have lower immunogenicity and/or have less risk of off-target DNA cleavage as compared to other techniques known to those of skill in the art.

[0428] Several methods for expressing siRNA duplexes within cells from a construct to achieve long-term target gene suppression in cells are known in the art, e.g., including constructs that use a mammalian Pol III promoter system (e.g., H1 or U6/snRNA promoter systems (Tuschl, Nature Biotechnol., 20:440-448, 2002, which is incorporated in its entirety herein by reference) to express functional double-stranded siRNAs; (Bagella et al., J. Cell. Physiol., 177:206-213, 1998; Lee et al., Nature Biotechnol., 20:500-505, 2002; Paul et al., Nature Biotechnol., 20:505-508, 2002; Yu et al., Proc. Natl. Acad. Sci. U.S.A., 99(9):6047-6052, 2002; Sui et al., Proc. Natl. Acad. Sci. U.S.A. 99(6):5515-5520, 2002, each of which is incorporated in its entirety herein by reference). Transcriptional termination by RNA Pol III occurs at runs of four consecutive T residues in a DNA template, and can be used to provide a mechanism to end the siRNA transcript at a specific sequence. An siRNA is complementary to a sequence of a target gene in 5′-3′ and 3′-5′ orientations, and the two strands of a given siRNA can be expressed in the same construct or in separate constructs. Hairpin siRNAs, driven by H1 or U6 snRNA promoter and expressed in cells, can inhibit target gene expression (Bagella et al., 1998, supra; Lee et al., 2002, supra; Paul et al., 2002, supra; Yu et al., 2002, supra; Sui et al., 2002, supra).

[0429] In some embodiments, siRNAs of the present disclosure are double stranded nucleic acid duplexes (of, e.g., 15, 16, 17, 18, 19, 20, 21, 22, 23, 24, 25, 26, or 27 base pairs) comprising annealed complementary single stranded nucleic acid molecules. In some embodiments, siRNAs are short dsRNAs comprising annealed complementary single strand RNAs. In some embodiments, siRNAs comprise an annealed RNA:DNA duplex, wherein the sense strand of a duplex is a DNA molecule and the antisense strand of the same duplex is a RNA molecule.

[0430] In some embodiments, duplexed siRNAs comprise a 2 or 3 nucleotide 3′ overhang on each strand of a duplex. In some embodiments, siRNAs comprise 5′-phosphate and 3′-hydroxyl groups.

[0431] In some embodiments, a siRNA molecule of the present disclosure includes one or more natural nucleobase and/or one or more modified nucleobases derived from a natural nucleobase. Examples include, but are not limited to, uracil, thymine, adenine, cytosine, and guanine having their respective amino groups protected by acyl protecting groups, 2-fluorouracil, 2-fluorocytosine, 5-bromouracil, 5-iodouracil, 2,6-diaminopurine, azacytosine, pyrimidine analogs such as pseudoisocytosine and pseudouracil and other modified nucleobases such as 8-substituted purines, xanthine, or hypoxanthine (the latter two being natural degradation products). Exemplary modified nucleobases are disclosed in Chiu and Rana, R N A, 2003, 9, 1034-1048, Limbach et al. Nucleic Acids Research, 1994, 22, 2183-2196 and Revankar and Rao, Comprehensive Natural Products Chemistry, vol. 7, 313, each of which is incorporated in its entirety herein by reference.

[0432] Modified nucleobases also include expanded-size nucleobases in which one or more aryl rings, such as phenyl rings, have been added. Nucleic base replacements described in the Glen Research catalog (available on the world wide web at glenresearch.com); Krueger A T et al., Acc. Chem. Res., 2007, 40, 141-150; Kool, ET, Acc. Chem. Res., 2002, 35, 936-943; Benner S. A., et al., Nat. Rev. Genet., 2005, 6, 553-543; Romesberg, F. E., et al., Curr. Opin. Chem. Biol., 2003, 7, 723-733; Hirao, I., Curr. Opin. Chem. Biol., 2006, 10, 622-627, each of which is incorporated in its entirety herein by reference, are contemplated as useful for siRNA molecules described herein. In some embodiments, modified nucleobases also encompass structures that are not considered nucleobases but are other moieties such as, but not limited to, corrin- or porphyrin-derived rings. Porphyrin-derived base replacements have been described in Morales-Rojas, H and Kool, ET, Org. Lett., 2002, 4, 4377-4380, which is incorporated in its entirety herein by reference.

[0433] In some embodiments, modified nucleobases are of any one of the following structures, optionally substituted:

[chemical structure]

[0434] In some embodiments, a modified nucleobase is fluorescent. Exemplary such fluorescent modified nucleobases include phenanthrene, pyrene, stillbene, isoxanthine, isozanthopterin, terphenyl, terthiophene, benzoterthiophene, coumarin, lumazine, tethered stillbene, benzo-uracil, and naphtho-uracil, as shown below:

[chemical structure]

[0435] In some embodiments, a modified nucleobase is unsubstituted. In some embodiments, a modified nucleobase is substituted. In some embodiments, a modified nucleobase is substituted such that it contains, e.g., heteroatoms, alkyl groups, or linking moieties connected to fluorescent moieties, biotin or avidin moieties, or other protein or peptides. In some embodiments, a modified nucleobase is a “universal base” that is not a nucleobase in the most classical sense, but that functions similarly to a nucleobase. One representative example of such a universal base is 3-nitropyrrole.

[0436] In some embodiments, siRNA molecules described herein include nucleosides that incorporate modified nucleobases and/or nucleobases covalently bound to modified sugars. Some examples of nucleosides that incorporate modified nucleobases include 4-acetylcytidine; 5-(carboxyhydroxylmethyl)uridine; 2′-O-methylcytidine; 5-carboxymethylaminomethyl-2-thiouridine; 5-carboxymethylaminomethyluridine; dihydrouridine; 2′-O-methylpseudouridine; beta,D-galactosylqueosine; 2′-O-methylguanosine; N⁶-isopentenyladenosine; 1-methyladenosine; 1-methylpseudouridine; 1-methylguanosine; 1-methylinosine; 2,2-dimethylguanosine; 2-methyladenosine; 2-methylguanosine; N⁷-methylguanosine; 3-methyl-cytidine; 5-methylcytidine; 5-hydroxymethylcytidine; 5-formylcytosine; 5-carboxylcytosine; N⁶-methyladenosine; 7-methylguanosine; 5-methylaminoethyluridine; 5-methoxyaminomethyl-2-thiouridine; beta,D-mannosylqueosine; 5-methoxycarbonylmethyluridine; 5-methoxyuridine; 2-methylthio-N⁶-isopentenyladenosine; N-((9-beta,D-ribofuranosyl-2-methylthiopurine-6-yl)carbamoyl)threonine; N-((9-beta,D-ribofuranosylpurine-6-yl)-N-methylcarbamoyl)threonine; uridine-5-oxyacetic acid methylester; uridine-5-oxyacetic acid (v); pseudouridine; queosine; 2-thiocytidine; 5-methyl-2-thiouridine; 2-thiouridine; 4-thiouridine; 5-methyluridine; 2′-O-methyl-5-methyluridine; and 2′-O-methyluridine.

[0437] In some embodiments, nucleosides include 6′-modified bicyclic nucleoside analogs that have either (R) or (S)-chirality at the 6′-position and include the analogs described in U.S. Pat. No. 7,399,845, which is incorporated in its entirety herein by reference. In other embodiments, nucleosides include 5′-modified bicyclic nucleoside analogs that have either (R) or (S)-chirality at the 5′-position and include the analogs described in U.S. Publ. No. 20070287831, which is incorporated in its entirety herein by reference. In some embodiments, a nucleobase or modified nucleobase is 5-bromouracil, 5-iodouracil, or 2,6-diaminopurine. In some embodiments, a nucleobase or modified nucleobase is modified by substitution with a fluorescent moiety.

[0438] Methods of preparing modified nucleobases are described in, e.g., U.S. Pat. Nos. 3,687,808; 4,845,205; 5,130,30; 5,134,066; 5,175,273; 5,367,066; 5,432,272; 5,457,187; 5,457,191; 5,459,255; 5,484,908; 5,502,177; 5,525,711; 5,552,540; 5,587,469; 5,594,121, 5,596,091; 5,614,617; 5,681,941; 5,750,692; 6,015,886; 6,147,200; 6,166,197; 6,222,025; 6,235,887; 6,380,368; 6,528,640; 6,639,062; 6,617,438; 7,045,610; 7,427,672; and 7,495,088, each of which is incorporated in its entirety herein by reference.

[0439] In some embodiments, a siRNA molecule described herein includes one or more modified nucleotides wherein a phosphate group or linkage phosphorus in its nucleotides are linked to various positions of a sugar or modified sugar. As non-limiting examples, a phosphate group or linkage phosphorus can be linked to a 2′, 3′, 4′ or 5′ hydroxyl moiety of a sugar or modified sugar. Nucleotides that incorporate modified nucleobases as described herein are also contemplated in this context.

[0440] Other modified sugars can also be incorporated within a siRNA molecule. In some embodiments, a modified sugar contains one or more substituents at a 2′ position including one of the following: —F; —CF₃, —CN, —N₃, —NO, —NO₂, —OR′, —SR′, or —N(R′)₂, wherein each R′ is independently as defined above and described herein; —O—(C₁-C₁₀ alkyl), —S—(C₁-C₁₀ alkyl), —NH—(C₁-C₁₀ alkyl), or —N(C₁-C₁₀ alkyl)₂; —O—(C₂-C₁₀ alkenyl), —S—(C₂-C₁₀ alkenyl), —NH—(C₂-C₁₀ alkenyl), or —N(C₂-C₁₀ alkenyl)₂; —O—(C₂-C₁₀ alkynyl), —S—(C₂-C₁₀ alkynyl), —NH—(C₂-C₁₀ alkynyl), or —N(C₂-C₁₀ alkynyl)₂; or —O—(C₁-C₁₀ alkylene)-O—(C₁-C₁₀ alkyl), —O—(C₁-C₁₀ alkylene)-NH—(C₁-C₁₀ alkyl) or —O—(C₁-C₁₀ alkylene)-NH(C₁-C₁₀ alkyl)₂, —NH—(C₁-C₁₀ alkylene)-O—(C₁-C₁₀ alkyl), or —N(C₁-C₁₀ alkyl)-(C₁-C₁₀ alkylene)-O—(C₁-C₁₀ alkyl), wherein the alkyl, alkylene, alkenyl and alkynyl may be substituted or unsubstituted. Examples of substituents include, and are not limited to, —O(CH₂)·OCH₃, and —O(CH₂)ₙNH₂, wherein n is from 1 to about 10, MOE, DMAOE, DMAEOE. Also contemplated herein are modified sugars described in WO 2001/088198; and Martin et al., Helv. Chim. Acta, 1995, 78, 486-504, each of which is incorporated in its entirety herein by reference. In some embodiments, a modified sugar comprises one or more groups selected from a substituted silyl group, an RNA cleaving group, a reporter group, a fluorescent label, an intercalator, a group for improving pharmacokinetic properties of a nucleic acid, a group for improving pharmacodynamic properties of a nucleic acid, or other substituents having similar properties. In some embodiments, modifications are made at one or more of a 2′, 3′, 4′, 5′, or 6′ positions of a sugar or modified sugar, including a 3′ position of a sugar on a 3′-terminal nucleotide or in a 5′ position of a 5′-terminal nucleotide.

[0441] In some embodiments, a 2′-OH of a ribose is replaced with a substituent including one of the following: —H, —F; —CF₃, —CN, —N₃, —NO, —NO₂, —OR′, —SR′, or —N(R′)₂, wherein each R′ is independently as defined above and described herein; —O—(C₁-C₁₀ alkyl), —S—(C₁-C₁₀ alkyl), —NH—(C₁-C₁₀ alkyl), or —N(C₁-C₁₀ alkyl)₂; —O—(C₂-C₁₀ alkenyl), —S—(C₂-C₁₀ alkenyl), —NH—(C₂-C₁₀ alkenyl), or —N(C₂-C₁₀ alkenyl)₂; —O—(C₂-C₁₀ alkynyl), —S—(C₂-C₁₀ alkynyl), —NH—(C₂-C₁₀ alkynyl), or —N(C₂-C₁₀ alkynyl)₂; or —O—(C₁-C₁₀ alkylene)-O—(C₁-C₁₀ alkyl), —O—(C₁-C₁₀ alkylene)-NH—(C₁-C₁₀ alkyl) or —O—(C₁-C₁₀ alkylene)-NH(C₁-C₁₀ alkyl)₂, —NH—(C₁-C₁₀ alkylene)-O—(C₁-C₁₀ alkyl), or —N(C₁-C₁₀ alkyl)-(C₁-C₁₀ alkylene)-O—(C₁-C₁₀ alkyl), wherein an alkyl, alkylene, alkenyl and alkynyl may be substituted or unsubstituted. In some embodiments, a 2′-OH is replaced with —H (deoxyribose). In some embodiments, a 2′-OH is replaced with —F. In some embodiments, a 2′-OH is replaced with —OR′. In some embodiments, a 2′-OH is replaced with —OMe. In some embodiments, a 2′-OH is replaced with —OCH₂CH₂OMe.

[0442] Modified sugars also include locked nucleic acids (LNAs). In some embodiments, a locked nucleic acid has the structure indicated below. A locked nucleic acid of the structure below is indicated, wherein Ba represents a nucleobase or modified nucleobase as described herein, and wherein R²s is —OCH₂C4′-

[chemical structure]

[0443] In some embodiments, a modified sugar is an ENA such as those described in, e.g., Seth et al., J Am Chem Soc. 2010 Oct. 27; 132(42): 14942-14950, which is incorporated in its entirety herein by reference. In some embodiments, a modified sugar is any of those found in an XNA (xenonucleic acid), for instance, arabinose, anhydrohexitol, threose, 2′fluoroarabinose, or cyclohexene.

[0444] Modified sugars include sugar mimetics such as cyclobutyl or cyclopentyl moieties in place of the pentofuranosyl sugar (see, e.g., U.S. Pat. Nos. 4,981,957; 5,118,800; 5,319,080; and 5,359,044, each of which is incorporated in its entirety herein by reference). Some modified sugars that are contemplated include sugars in which an oxygen atom within a ribose ring is replaced by nitrogen, sulfur, selenium, or carbon. In some embodiments, a modified sugar is a modified ribose wherein an oxygen atom within a ribose ring is replaced with nitrogen, and wherein a nitrogen is optionally substituted with an alkyl group (e.g., methyl, ethyl, isopropyl, etc.).

[0445] Non-limiting examples of modified sugars include glycerol, which form glycerol nucleic acid (GNA) analogues. An exemplary GNA analogue is described in Zhang, R et al., J. Am. Chem. Soc., 2008, 130, 5846-5847, which is incorporated in its entirety herein by reference; see also Zhang L, et al., J. Am. Chem. Soc., 2005, 127, 4174-4175 and Tsai C H et al., PNAS, 2007, 14598-14603, each which is incorporated in its entirety herein by reference. Another example of a GNA derived analogue, flexible nucleic acid (FNA) based on mixed acetal aminal of formyl glycerol, is described in each of Joyce G F et al., PNAS, 1987, 84, 4398-4402 and Heuberger B D and Switzer C, J. Am. Chem. Soc., 2008, 130, 412-413, each of which is incorporated in its entirety herein by reference. Additional non-limiting examples of modified sugars include hexopyranosyl (6′ to 4′), pentopyranosyl (4′ to 2′), pentopyranosyl (4′ to 3′), or tetrofuranosyl (3′ to 2′) sugars.

[0446] Modified sugars and sugar mimetics can be prepared by methods known in the art, including, but not limited to: A. Eschenmoser, Science (1999), 284:2118; M. Bohringer et al., Helv. Chim. Acta (1992), 75:1416-1477; M. Egli et al., J. Am. Chem. Soc. (2006), 128(33):10847-56; A. Eschenmoser in Chemical Synthesis: Gnosis to Prognosis, C. Chatgilialoglu and V. Sniekus, Ed., (Kluwer Academic, Netherlands, 1996), p. 293; K.-U. Schoning et al., Science (2000), 290:1347-1351; A. Eschenmoser et al., Helv. Chim. Acta (1992), 75:218; J. Hunziker et al., Helv. Chim. Acta (1993), 76:259; G. Otting et al., Helv. Chim. Acta (1993), 76:2701; K. Groebke et al., Helv. Chim. Acta (1998), 81:375; and A. Eschenmoser, Science (1999), 284:2118. Modifications to 2′ modifications can be found in Verma, S. et al. Annu. Rev. Biochem. 1998, 67, 99-134 and all references therein, each of which is incorporated in its entirety herein by reference. Specific modifications to a ribose can be found in the following references: 2′-fluoro (Kawasaki et. al., J. Med. Chem., 1993, 36, 831-841), 2′-MOE (Martin, P. Helv. Chim. Acta 1996, 79, 1930-1938), “LNA” (Wengel, J. Acc. Chem. Res. 1999, 32, 301-310); PCT Publication No. WO2012/030683, each of which is incorporated in its entirety herein by reference.

[0447] In some embodiments, a siRNA described herein can be introduced to a target cell as an annealed duplex siRNA. In some embodiments, a siRNA described herein is introduced to a target cell as single stranded sense and antisense nucleic acid sequences that, once within a target cell, anneal to form a siRNA duplex. Alternatively, sense and antisense strands of an siRNA can be encoded by an expression construct (such as an expression construct described herein) that is introduced to a target cell. Upon expression within a target cell, transcribed sense and antisense strands can anneal to reconstitute an siRNA.

[0448] In some embodiments, an siRNA molecule as described herein can be synthesized by standard methods known in the art, e.g., by use of an automated synthesizer. Without being bound by any particular theory, RNAs produced by such methodologies tend to be highly pure and to anneal efficiently to form siRNA duplexes. In some embodiments, following chemical synthesis, single stranded RNA molecules can be deprotected, annealed to form siRNAs, and purified (e.g., by gel electrophoresis or HPLC). Alternatively, in some embodiments, standard procedures can be used for in vitro transcription of RNA from DNA templates, e.g., carrying one or more RNA polymerase promoter sequences (e.g., T7 or SP6 RNA polymerase promoter sequences). Protocols for preparation of siRNAs using T7 RNA polymerase are known in the art (see, e.g., Donze and Picard, Nucleic Acids Res. 2002; 30:e46; and Yu et al., Proc. Natl. Acad. Sci. USA 2002; 99:6047-6052, each of which is incorporated in its entirety herein by reference). In some embodiments, sense and antisense transcripts can be synthesized in two independent reactions and annealed later. In some embodiments, sense and antisense transcripts can be synthesized simultaneously in a single reaction.

[0449] In some embodiments, an siRNA molecule can also be formed within a cell by transcription of RNA from an expression construct introduced into a cell (see, e.g., Yu et al., Proc. Natl. Acad. Sci. USA 2002; 99:6047-6052, which is incorporated in its entirety herein by reference). For example, in some embodiments, an expression construct for in vivo production of siRNA molecules can include one or more siRNA encoding sequences operably linked to elements necessary for proper transcription of an siRNA encoding sequence(s), including, e.g., promoter elements and transcription termination signals. In some embodiments, preferred promoters for use in such expression constructs may include, e.g., a polymerase-III promoter, e.g., a polymerase-III HI-RNA promoter (see, e.g., Brummelkamp et al., Science 2002; 296:550-553, which is incorporated in its entirety herein by reference), a U6 polymerase-III promoter (see, e.g., Sui et al., Proc. Natl. Acad. Sci. USA 2002; Paul et al., Nature Biotechnol. 2002; 20:505-508; and Yu et al., Proc. Natl. Acad. Sci. USA 2002; 99:6047-6052, each of which is incorporated in its entirety herein by reference). In some embodiments, an siRNA expression construct can comprise one or more construct sequences that facilitate cloning of an expression construct. Standard constructs that can be used include, e.g., pSilencer 2.0-U6 construct (Ambion Inc., Austin, Tex.).

[0450] In some embodiments, an siRNA is or comprises nucleotides of any one of SEQ ID Nos: 48-55. In some embodiments, an siRNA comprises a mature guide strand having a nucleotide sequence that is at least 90%, 91%, 92%, 93%, 94%, 95%, 96%, 97%, 98%, 99%, or 100% identical to any one of SEQ ID NOs:48-55 (or a portion thereof). In some embodiments, a portion is 15, 16, 17, 18, 19, or 20 nucleotides long. In some embodiments, an siRNA comprises a mature guide strand having a nucleotide sequence that is 100% identical to nucleotides 2-8 of any one of SEQ ID NOs: 48-55

[0451] In some embodiments, the present disclosure provides shRNA sequences, which, when introduced into a cell will be cleaved to siRNAs. Accordingly, by way of non-limiting example, shRNA sequences of the present disclosure may be or comprise those provided in SEQ ID NOs 48-55 or elsewhere herein the disclosure.

[0452] Exemplary shRNA sequences are provided in SEQ ID NOS: 48-55.

miRNA

[0453] The present disclosure provides technologies related to or comprising one or more inhibitory nucleic acid molecules such as, e.g., one or more nucleotide sequences that are, comprise, or encode, microRNAs. MicroRNAs (miRNAs) are a highly conserved class of small RNA molecules that are transcribed from DNA in genomes of plants and animals, but are not translated into protein. As is known to those in the art, animal cells express a range of noncoding RNAs of approximately 22 nucleotides termed micro RNA (miRNAs) and can regulate gene expression at a post transcriptional or translational level during animal development. miRNAs are excised from an approximately 70 nucleotide precursor RNA stem-loop. By substituting stem sequences of an miRNA precursor with miRNA sequence complementary to a target mRNA, a construct that expresses a novel miRNA can be used to produce siRNAs to initiate RNAi against specific mRNA targets in mammalian cells (Zeng, Mol. Cell, 9:1327-1333, 2002). In some embodiments, when expressed by DNA constructs containing polymerase III promoters, microRNA designed hairpins can silence gene expression (McManus, RNA 8:842-850, 2002).

[0454] In some embodiments, miRNAs can be synthesized and locally or systemically administered to a subject, e.g., for therapeutic purposes. In some embodiments, miRNAs can be designed and/or synthesized as mature molecules or precursors (e.g., pri- or pre-miRNAs). In some embodiments, a pre-miRNA includes a guide strand and a passenger strand that are the same length (e.g., about 15, 16, 17, 18, 19, 20, 21, 22, 23, 24, or 25 nucleotides). In some embodiments, a pre-miRNA includes a guide strand and a passenger strand that are different lengths (e.g., one strand is about 19 nucleotides, and the other is about 21 nucleotides). In some embodiments, an miRNA can target a coding region, a 5′ untranslated region, and/or a 3′ untranslated region, of endogenous mRNA. In some embodiments, an miRNA comprises a guide strand comprising a nucleotide sequence having sufficient sequence complementary with an endogenous mRNA of a subject to hybridize with and inhibit expression of endogenous mRNA.

[0455] In some embodiments, miRNAs has advantages compared to shRNAs for inhibiting nucleic acids. For example, shRNA requires a high level of expression, can clog Argonaut machinery, is not endogenous, and relies on two promoters. By contrast, in some embodiments, it is contemplated that miRNA is more “endogenous” than shRNA, and therefore, is expressed at similar levels as KCNQ4 driven by a single promoter. That is, miRNAs can be synthetic or naturally occurring and naturally-occurring miRNAs are present in cells across vertebrate and invertebrate species. In contrast, to date, shRNAs have not been detected as a naturally occurring component of a cell. In some embodiments, miRNAs have low or no passenger strand generation, can be used therapeutically, and/or are expressed in neurons and hair cells.

[0456] The present disclosure describes that, in some embodiments, minor changes (e.g., one or more substitutions) were made to the passenger strand of a given mRNA. In some such embodiments, such change(s) (e.g., substitution(s)) were made in order to ensure that the synthetic KCNQ4 miRNA would have the same secondary structure as an endogenous miRNA gene. For example, in some constructs, the G at position 73 of the KCNQ miR1 hsa-3miR-335 construct can be substituted for a C to generate a bulge (e.g., Pyr:Pur (G:U) can be substituted for Pyr:Pyr (C:U) base pairing). One or more such base changes (e.g., substitution) can, in some embodiments, result in a secondary structure (e.g., bulge position) in the synthetic miRNA such that the secondary structure is similar or identical to that of an endogenous miRNA gene. One of ordinary skill in the art will appreciate that the exact location (e.g., base or bases) where one or more changes (e.g., substitutions) is made will vary with the exact sequence of a synthetic miRNA, and one of such skill will understand how to modify bases relative to the sequence of a synthesized construct as compared to its endogenous counterpart.

[0457] The present disclosure also recognizes the surprising finding that, in some embodiments, an miRNA of the same sequence of an shRNA provides an unexpected increase in efficiency. For example, in some embodiments, if an shRNA and miRNA are designed for a given target, the present disclosure provides the surprising finding that an miRNA is much more efficient (as measured by KD) as compared to an shRNA of the same sequence. In some embodiments, an miRNA comprises a mature guide strand having a nucleotide sequence that is at least 90%, 91%, 92%, 93%, 94%, 95%, 96%, 97%, 98%, 99%, or 100% identical to any one of SEQ ID NOs:56-70 (or a portion thereof). In some embodiments, a portion is 15, 16, 17, 18, 19, or 20 nucleotides long. In some embodiments, an miRNA comprises a mature guide strand having a nucleotide sequence that is 100% identical to nucleotides 2-8 of any one of SEQ ID NOs: 56-70.

[0458] Exemplary miR sequences are provided in SEQ ID NOs. 56-70, 96, 97, or 331.

[0459] In some embodiments, the present disclosure provides methods for choosing miRNAs targeting sequences expressed within a variety of compartments within an ear. For example, spiral ganglion: miR-96, -182, -183, -15a, -30b, -99a, -18a, -124a, -194; spiral limbus: miR-96, -182, -193, -205; Reissner's membrane: miR-205; marginal cells: miR-376a, -376b; spiral ligament: miR-205; supporting cells: miR-15a, -30b, -99a; hair cells: miR-96, -182, -183, -15a, -30b, -99a, -18a, -140, 194; basilar membrane: miR-205, -15a, -30b, -99a; inner sulcus: miR-96, -182, -183). Ushakov et al., 2013. As described herein, miRNA scaffolds miR-16, miR-26, miR-96 (hair cells), miR-122, miR-135, miR-155, miR-182 (hair cells), miR-183 (hair cells), miR-335, and miR-451 were considered for initial testing of impact on KCNQ4 expression. In some embodiments, an miRNA may comprise or consist of miR1-155; miR2-155; miR4-155; miR5-155; miR6-155; miR7-155; miR1-16; miR1-26; miR1-96; miR1-122; miR1-135; miR1-182; miR1-183; miR1-335; miR1-451. In some embodiments, a construct of the present disclosure may comprise one or more miRNAs selected from miR1-155; miR2-155; miR4-155; miR5-155; miR6-155; miR7-166 miR1-16; miR1-26; miR1-96; miR1-122; miR1-135; miR1-182; miR1-183; miR1-335; miR1-451 and combinations thereof.

### Antisense Nucleic Acid

[0460] In some embodiments, an inhibitory nucleic acid molecule may be or comprise an antisense nucleic acid molecule, e.g., nucleic acid molecules whose nucleotide sequence is complementary to all or part of an mRNA encoding a potassium channel (e.g., KCNQ4) protein. In some embodiments, an antisense nucleic acid molecule can be antisense to all or part of a non-coding region of a coding strand of a nucleotide sequence encoding a potassium channel (e.g., KCNQ4) protein. In some embodiments, a non-coding regions (“5′ and 3′ untranslated regions”) are 5′ and 3′ sequences that flank a coding region and are not translated into amino acids. Based upon sequences disclosed herein, one of skill in the art can easily choose and synthesize any of a number of appropriate antisense molecules to target a potassium channel (e.g., KCNQ4) gene described herein. For example, a “gene walk” comprising a series of oligonucleotides of 15-30 nucleotides spanning a length of a nucleic acid (e.g., a potassium channel (e.g., KCNQ4) mRNA) can be prepared, followed by testing for inhibition of expression of ta gene. Optionally, gaps of 5-10 nucleotides can be left between oligonucleotides to reduce numbers of oligonucleotides synthesized and tested.

[0461] In some embodiments, an antisense oligonucleotide can be, for example, about 5, 10, 15, 20, 25, 30, 35, 40, 45, or 50 nucleotides or more in length. One of skill in the art will recognize that an antisense oligonucleotide can be synthesized using various different chemistries.

### Ribozymes

[0462] In some embodiments, an inhibitory nucleic acid molecule may be or comprise a ribozyme. As is known to those of skill in the art, ribozymes are catalytic RNA molecules with ribonuclease activity. In some embodiments, a ribozyme may be used as a controllable promoter. In some embodiments, ribozymes are capable of cleaving a single-stranded nucleic acid, such as an mRNA, to which they have a complementary region. Thus, in some embodiments, ribozymes (e.g., hammerhead ribozymes (described in Haselhoff and Gerlach, Nature, 334:585-591, 1988, which is incorporated in its entirety herein by reference)) can be used to catalytically cleave mRNA transcripts to thereby inhibit translation of a protein encoded by a given mRNA. Methods of designing and producing ribozymes are known in the art (see, e.g., Scanlon, 1999, Therapeutic Applications of Ribozymes, Humana Press, which is incorporated in its entirety herein by reference). In some embodiments, for example, a ribozyme having specificity for a KCNQ4 gene product mRNA can be designed based upon nucleotide sequence of a KCNQ4 gene product cDNA (e.g., any exemplary cDNA sequences described herein). For example, a derivative of a Tetrahymena L-19 IVS RNA can be constructed in which nucleotide sequence of an active site is complementary to a nucleotide sequence to be cleaved in a KCNQ4 gene product mRNA (Cech et al. U.S. Pat. No. 4,987,071; and Cech et al., U.S. Pat. No. 5,116,742, each of which is incorporated in its entirety herein by reference). Alternatively, an mRNA encoding a KCNQ4 gene product protein can be used to select a catalytic RNA having a specific ribonuclease activity from a pool of RNA molecules (See, e.g., Bartel and Szostak, Science, 261:1411-1418, 1993, which is incorporated in its entirety herein by reference).

g. Pharmaceutical Compositions and Kits

[0463] Pharmaceutical compositions of the present disclosure may include constructs, as described herein. For example, in some embodiments, pharmaceutical compositions may comprise AAV constructs and/or AAV particles. In some such embodiments, such AAV particles comprise one or more constructs, which comprise a nucleic acid, e.g., one or a plurality of AAV constructs. For example, a pharmaceutical composition of the present disclosure comprise as described herein, in combination with one or more pharmaceutically or physiologically acceptable carriers, diluents or excipients. Such compositions may comprise buffers such as neutral buffered saline, phosphate buffered saline and the like; carbohydrates such as glucose, mannose, sucrose, or dextrans; mannitol; proteins; polypeptides or amino acids such as glycine; antioxidants; chelating agents such as EDTA or glutathione; adjuvants (e.g., aluminum hydroxide); and preservatives. In some embodiments, compositions of the present disclosure are formulated for intravenous administration. In some embodiments compositions of the present disclosure are formulated for intra-cochlear administration.

[0464] In some embodiments, therapeutic compositions of the present disclosure are formulated for intra-cochlear administration. In some embodiments, a therapeutic composition is formulated to comprise a lipid nanoparticle, a polymeric nanoparticle, a mini-circle DNA or a CELiD DNA.

[0465] In some embodiments, a therapeutic composition is formulated to comprise a synthetic perilymph solution. For example, in some embodiments, a synthetic perilymph solution includes 20-200 mM NaCl; 1-5 mM KCl; 0.1-10 mM CaCl₂); 1-10 mM glucose; and 2-50 mM HEPES, with a pH between about 6 and about 9. In some embodiments, any of the pharmaceutical compositions described herein may further comprise one or more agents that promote entry of a nucleic acid or any of the constructs described herein into a mammalian cell (e.g., a liposome or cationic lipid). In some embodiments, any constructs described herein can be formulated using natural and/or synthetic polymers. Non-limiting examples of polymers that may be included in any compositions described herein can include, but are not limited to, DYNAMIC POLYCONJUGATE® (Arrowhead Research Corp., Pasadena, Calif.), formulations from Mirus Bio (Madison, Wis.) and Roche Madison (Madison, Wis.), PhaseRX polymer formulations such as, without limitation, SMARTT POLYMER TECHNOLOGY® (PhaseRX, Seattle, Wash.), DMRI/DOPE, poloxamer, VAXFECTIN® adjuvant from Vical (San Diego, Calif), chitosan, cyclodextrin from Calando Pharmaceuticals (Pasadena, Calif.), dendrimers and poly (lactic-co-glycolic acid) (PLGA) polymers, RONDEL™ (RNAi/Oligonucleotide Nanoparticle Delivery) polymers (Arrowhead Research Corporation, Pasadena, Calif.), and pH responsive co-block polymers, such as, but not limited to, those produced by PhaseRX (Seattle, Wash.). Many of these polymers have demonstrated efficacy in delivering oligonucleotides in vivo into a mammalian cell (see, e.g., deFougerolles, Human Gene Ther. 19:125-132, 2008; Rozema et al., Proc. Natl. Acad. Sci. U.S.A. 104:12982-12887, 2007; Rozema et al., Proc. Natl. Acad. Sci. U.S.A. 104:12982-12887, 2007; Hu-Lieskovan et al., Cancer Res. 65:8984-8982, 2005; Heidel et al., Proc. Natl. Acad. Sci. U.S.A. 104:5715-5721, 2007, each of which is incorporated in its entirety herein by reference). Any compositions described herein can be, e.g., a pharmaceutical composition.

[0466] In some embodiments, a composition includes a pharmaceutically acceptable carrier (e.g., phosphate buffered saline, saline, or bacteriostatic water). Upon formulation, solutions can be administered in a manner compatible with a dosage formulation and in such amount as is therapeutically effective. Formulations are easily administered in a variety of dosage forms such as injectable solutions, injectable gels, drug-release capsules, and the like.

[0467] Compositions provided herein can be, e.g., formulated to be compatible with their intended route of administration. A non-limiting example of an intended route of administration is local administration (e.g., intra-cochlear administration).

[0468] Also provided are kits including any compositions described herein. In some embodiments, a kit can include a solid composition (e.g., a lyophilized composition including at least one construct as described herein) and a liquid for solubilizing a lyophilized composition.

[0469] In some embodiments, a kit can include a pre-loaded syringe including any compositions described herein.

[0470] In some embodiments, a kit includes a vial comprising any of the compositions described herein (e.g., formulated as an aqueous composition, e.g., an aqueous pharmaceutical composition).

[0471] In some embodiments, a kit can include instructions for performing any methods described herein.

h. Cells

[0472] In some embodiments, the present disclosure provides a cell (e.g., a mammalian cell, e.g., a human cell, e.g., an ear hair cell, e.g., an OHC, an IHC, etc.) that comprises any nucleic acids, constructs (e.g., at least two different constructs described herein), compositions, etc., as described herein. As will be appreciated by one of skill in the art, nucleic acids and constructs described herein can be introduced into any cell (e.g., a mammalian cell, e.g., a human cell, e.g., an ear hair cell, e.g., an OHC, an IHC, etc.). Non-limiting examples of certain constructs and methods for introducing constructs into cells are described herein.

[0473] In some embodiments, a cell is a human cell, a mouse cell, a porcine cell, a rabbit cell, a dog cell, a rat cell, a sheep cell, a cat cell, a horse cell, a non-human primate cell, or an insect cell. In some embodiments, a cell is a specialized cell of the cochlea. In some embodiments, a cell is a cochlear inner hair cell or a cochlear outer hair cell. In some embodiments, a cell is a cochlear inner hair cell. In some embodiments, a cell is a cochlear outer hair cell.

[0474] In some embodiments, a cell is in vitro. In some embodiments, a cell is in vivo or ex vivo. For example, in some embodiments, cell is present in a mammal. In some embodiments, a cell (e.g., a mammalian cell) is autologous cell obtained, e.g., from a subject (e.g., a mammal) and cultured ex vivo.

[0475] In some embodiments, cells provided by the present disclosure are transfected host cells. In some embodiments, transfection is used to refer to uptake of foreign DNA by a cell, and a cell has been “transfected” when exogenous DNA has been introduced inside a cell membrane. A number of transfection techniques are generally known in the art (see, e.g., Graham et al. (1973) Virology, 52:456; Sambrook et al. (1989) Molecular Cloning, a laboratory manual, Cold Spring Harbor Laboratories, New York, Davis et al. (1986) Basic Methods in Molecular Biology, Elsevier; and Chu et al. (1981) Gene 13:197, each of which is incorporated in its entirety herein by reference). Such techniques can be used to introduce one or more exogenous nucleic acids, such as a nucleotide integration construct and other nucleic acid molecules, into suitable host cells.

[0476] In some embodiments, a host cell is a mammalian cell. A host cell may be used as a recipient of an AAV helper construct, an AAV minigene plasmid, an accessory function construct, and/or other transfer DNA associated with production of recombinant AAVs. The term includes progeny of an original cell that has been transfected. In some embodiments, a host cell is a cell that has been transfected with an exogenous DNA sequence. It is understood that progeny of a single parental cell may not necessarily be completely identical in morphology or in genomic or total DNA complement as the original parent, due to natural, accidental, or deliberate mutation.

### 4. Methods

[0477] Among other things, the present disclosure provides methods. In some embodiments, a method comprises introducing a composition as described herein into the inner ear (e.g., a cochlea) of a subject. For example, provided herein are methods that in some embodiments include administering to an inner ear (e.g., cochlea) of a subject (e.g., an animal, e.g., a mammal, e.g., a primate, e.g., a human) a therapeutically effective amount of any composition described herein.

[0478] In some embodiments, the present disclosure provides methods of generating and/or testing one or more compositions of components thereof. In some such embodiments, compositions may be used to treat a subject with hearing loss. In some embodiments, the present disclosure provides methods of genetically modifying one or more cells. In some embodiments, methods of the present disclosure, including compositions produced or administered using such methods include those in WO 2019/028246 A2, PCT/US2019/060324, and PCT/US2019/060328, each of which is incorporated by reference herein, in its entirety.

[0479] For example, in some embodiments, in addition to the exemplary compositions described herein, FIG. 6 depicts exemplary miRNA constructs that can be used in accordance with the present disclosure. These sequences and constructs can be tested (e.g., via double transfection) in cells (e.g., human cells, e.g., HEK cells, e.g., hair cells, e.g., outer hair cells), in single, and/or in multiplexed format. mRNA and protein levels are or can be measured using appropriate qualitative or quantitative techniques such as PCR, immunofluorescence (of cells) and western blot techniques. As described herein, exemplary miRNA constructs can be delivered as plasmids (or constructs), or via AAV compositions described herein.

a. Methods of Making

[0480] In some embodiments, viral constructs are prepared by any methods known to one of skill in the art. For example, in some embodiments, viral constructs are prepared using a standard triple transfection system (e.g., three plasmids/constructs, comprising (i) rep/cap genes, (ii) helper genes, and (iii) payloads (e.g., miRNA, KCNQ4, etc.) respectively, e.g., four plasmids/constructs, etc.) followed by standard isolation and purification methods (e.g., CsCl gradient). In some such embodiments, such viral preparations are formulated for delivery into a subject.

[0481] The present disclosure provides, among other things, method of making AAV-based constructs. In some embodiments, such methods include use of host cells. In some embodiments, a host cell is a mammalian cell. A host cell may be used as a recipient of an AAV helper construct, an AAV minigene plasmid, an accessory function construct, and/or other transfer DNA associated with production of recombinant AAVs. The term includes progeny of an original cell that has been transfected. Thus, a “host cell” as used herein may refer to a cell that has been transfected with an exogenous DNA sequence. It is understood that progeny of a single parental cell may not necessarily be completely identical in morphology or in genomic or total DNA complement as the original parent, due to natural, accidental, or deliberate mutation.

[0482] Additional methods for generating and isolating AAV viral constructs suitable for delivery to a subject are described in, e.g., U.S. Pat. Nos. 7,790,449; 7,282,199; WO 2003/042397; WO 2005/033321, WO 2006/110689; and U.S. Pat. No. 7,588,772, each of which is incorporated in its entirety herein by reference. In one system, a producer cell line is transiently transfected with a construct that encodes a transgene flanked by ITRs and a construct(s) that encodes rep and cap. In another system, a packaging cell line that stably supplies rep and cap is transiently transfected with a construct encoding a transgene flanked by ITRs. In each of these systems, AAV virions are produced in response to infection with helper adenovirus or herpesvirus, and AAVs are separated from contaminating virus. Other systems do not require infection with helper virus to recover AAV-helper functions (i.e., adenovirus E1, E2a, VA, and E4 or herpesvirus UL5, UL8, UL52, and UL29, and herpesvirus polymerase) are also supplied, in trans, by a given system. In such systems, helper functions can be supplied by transient transfection of cells with constructs that encode helper functions, or cells can be engineered to stably contain genes encoding helper functions, expression of which can be controlled at a transcriptional and/or posttranscriptional level.

[0483] In yet another embodiment, the present disclosure provides a system in which transgene flanked by ITRs and rep/cap genes are introduced into insect host cells by infection with insect virus (e.g., baculovirus)-based constructs. Such production systems are known in the art (see generally, e.g., Zhang et al., 2009, Human Gene Therapy 20:922-929). Methods of making and using these and other AAV production systems are also described in U.S. Pat. Nos. 5,139,941; 5,741,683; 6,057,152; 6,204,059; 6,268,213; 6,491,907; 6,660,514; 6,951,753; 7,094,604; 7,172,893; 7,201,898; 7,229,823; and 7,439,065, each of which is incorporated in its entirety herein by reference.

b. Methods of Treatment

[0484] In some embodiments, technologies of the present disclosure are used to treat subjects with or at risk of hearing loss. For example, in some embodiments, a subject has an autosomal dominant hearing loss attributed to at least one variant of a KCNQ4 gene. It will be understood by those in the art that many different changes (e.g., substitutions, deletions, additions, etc.) in a KCNQ4 gene that can result in or risk causing hearing loss. In some such embodiments, one or more changes in a KCNQ4 sequence results in a loss-of-function KCNQ4 gene variant.

[0485] In some embodiments, a subject experience hearing loss can be evaluated to determine if and where one or more mutations may exists that may cause hearing loss. In some such embodiments, status of a KCNQ4 gene product (e.g., polynucleotide, e.g., polypeptide) or function can be evaluated (e.g., via protein or sequencing analyses). In some embodiments of any methods described herein, a subject may be a mammal. In some embodiments, a mammal is a rodent, a non-human primate, or a human. In some embodiments of any methods described herein, a subject is an adult, a teenager, a juvenile, a child, a toddler, an infant, newborn, or fetus. In some embodiments of any methods described herein, a subject is 1-5, 1-10, 1-20, 1-30, 1-40, 1-50, 1-60, 1-70, 1-80, 1-90, 1-100, 1-110, 2-5, 2-10, 10-20, 20-30, 30-40, 40-50, 50-60, 60-70, 70-80, 80-90, 90-100, 100-110, 10-30, 10-40, 10-50, 10-60, 10-70, 10-80, 10-90, 10-100, 10-110, 20-40, 20-50, 20-60, 20-70, 20-80, 20-90, 20-100, 20-110, 30-50, 30-60, 30-70, 30-80, 30-90, 30-100, 40-60, 40-70, 40-80, 40-90, 40-100, 50-70, 50-80, 50-90, 50-100, 60-80, 60-90, 60-100, 70-90, 70-100, 70-110, 80-100, 80-110, or 90-110 years of age. In some embodiments a subject is 1, 2, 3, 4, 5, 6, 7, 8, 9, 10, or 11 months of age. In some embodiments, a subject is 1, 2, 3, 4, 5 or more weeks of age. In some embodiments, a subject is between 23 and 42 gestational weeks of age (i.e., a fetus of a gestational age).

[0486] In some embodiments of any methods described herein, such methods may result in improvement in hearing (e.g., any metrics for determining improvement in hearing described herein) in a subject in need thereof for at least 10 days, at least 15 days, at least 20 days, at least 25 days, at least 30 days, at least 35 days, at least 40 days, at least 45 days, at least 50 days, at least 55 days, at least 60 days, at least 65 days, at least 70 days, at least 75 days, at least 80 days, at least 85 days, at least 100 days, at least 105 days, at least 110 days, at least 115 days, at least 120 days, at least 5 months, at least 6 months, at least 7 months, at least 8 months, at least 9 months, at least 10 months, at least 11 months, or at least 12 months.

[0487] In some embodiments a subject (e.g., a mammal, e.g., a human) has or is at risk of developing non-syndromic sensorineural hearing loss. In some embodiments a subject (e.g., a mammal, e.g., a human) has been previously identified as having a mutation in a KCNQ4 gene. In some embodiments a subject (e.g., a mammal, e.g., a human) has any mutations in a KCNQ4 gene that are described herein or are known in the art to be associated with non-symptomatic sensorineural hearing loss.

[0488] In some embodiments a subject (e.g., a mammal, e.g., a human) has been identified as being a carrier of a mutation in a KCNQ4 gene (e.g., via genetic testing). In some embodiments a subject (e.g., a mammal, e.g., a human) has been identified as having a mutation in a KCNQ4 gene and has been diagnosed with non-symptomatic sensorineural hearing loss. In some embodiments a subject (e.g., a mammal, e.g., a human) has been identified as having non-symptomatic sensorineural hearing loss.

[0489] In some embodiments, a subject (e.g., a mammal, e.g., a human) has been identified as being at risk of hearing loss (e.g., at risk of being a carrier of a gene mutation, e.g., a KCNQ4 gene mutation). In some such embodiments, a subject (e.g., a mammal, e.g., a human) may have, e.g., certain risk factors (e.g., parent or symptoms of hearing loss) of hearing loss or risk of hearing loss. In some such embodiments, a subject (e.g., a mammal, e.g., a human) has been identified as being a carrier of a mutation in a KCNQ4 gene (e.g., via genetic testing) that has not previously been identified (i.e., is not a published, known variant of a KCNQ4 gene sequence). In some such embodiments, identified mutations may be novel (i.e., not previously described in the literature), and methods of treatment for a subject suffering from or susceptible to hearing loss can be personalized to one or more mutation(s) of a particular subject (e.g., mammal, e.g., human).

[0490] In some embodiments, successful treatment of non-symptomatic sensorineural hearing loss can be determined in a subject using any conventional functional hearing tests known in the art. Non-limiting examples of functional hearing tests are various types of audiometric assays (e.g., pure-tone testing, speech testing, middle ear test, auditory brainstem response, and otoacoustic emissions).

[0491] In some embodiments, treatment comprises improve outer hair cell function and/or survival. In some embodiments, outer hair cell function is determined by performing a distortion product otoacoustic emissions (DPOAE) test, as described herein.

[0492] In some embodiments, treatment comprises improve inner hair cell function and/or survival.

c. Methods of Increasing Expression of KCNQ4

[0493] The present disclosure provides methods of increasing expression of a functional (e.g., gain-of-function) KNCQ4 gene product (e.g., a wild type KCNQ4, e.g., a codon optimized KCNQ4, a Kv7.4 protein) in a cell (e.g., a mammalian cell). In some such embodiments, such methods comprise introducing any compositions (e.g., a construct encoding a functional KCNQ4, e.g., a wild type KCNQ4, e.g., a codon optimized KCNQ4) described herein into a cell (e.g., a mammalian cell). In some embodiments, introduction is in vitro. In some embodiments, introduction is ex vivo. In some embodiments, introduction is in vivo.

[0494] In some such embodiments, a cell is a mammalian cell. In some embodiments, a mammalian cell is a cochlear cell. In some embodiments, a cochlear cell is a hair cell. In some embodiments, a cochlear hair cell is an inner hair cell. In some embodiments, a cochlear hair cell is an outer hair cell. In such some embodiments, a mammalian cell is a human cell (e.g., a human cochlear outer hair cell).

[0495] Methods for introducing any compositions described herein into a mammalian cell are known in the art (e.g., via lipofection or through use of a viral construct, e.g., any viral constructs described herein). In some embodiments, an increase in expression of a KCNQ4 gene product (e.g., a gene product encoding a functional KCNQ4) is determined, e.g., as compared to a control or to a level of expression of a KCNQ4 gene product prior to introduction of a composition as described herein. In some embodiments a decrease in a KCNQ4 variant gene product (e.g., a gene product that occurs as a result of a variant KCNQ4 gene) occurs concomitantly or sequentially with an increase in a functional KCNQ4 gene product.

d. Methods of Decreasing Expression of Endogenous KCNQ4 and/or Replacing Endogenous KCNQ4

[0496] The present disclosure provides methods of decreasing expression of an endogenous KNCQ4 gene product (e.g., a wild type KCNQ4, e.g., a loss-of-function KCNQ4 variant) in a cell (e.g., a mammalian cell) and/or replacing it with a different, functional (e.g., gain-of-function) KCNQ4 (e.g., a codon-optimized KCNQ4). In some embodiments, as described herein, endogenous KCNQ4 may be replaced by a codon-optimized version that has been engineered to resist inhibitory nucleic acid-mediated degradation (e.g., miRNA-mediated degradation). In some such embodiments, miRNA-mediated degradation is due to endogenous and/or exogenously introduced miRNAs. In some embodiments as described herein, a genome editing strategy may be or comprise, e.g., introduction of an exogenous miRNA and may be preceding, followed or substantially simultaneously include replacement of endogenous KCNQ4 gene with a codon-optimized KCNQ4 gene.

[0497] In some such embodiments, such methods comprise introducing any compositions (e.g., a construct encoding a functional KCNQ4, e.g., a wild type KCNQ4, e.g., a codon optimized KCNQ4) described herein into a cell (e.g., a mammalian cell). In some embodiments, introduction is in vitro. In some embodiments, introduction is ex vivo. In some embodiments, introduction is in vivo.

[0498] In some such embodiments, a cell is a mammalian cell. In some embodiments, the mammalian cell is a cochlear cell. In some embodiments, a cochlear cell is a hair cell. In some embodiments, a cochlear hair cell is an inner hair cell. In some embodiments, a cochlear hair cell is an outer hair cell. In some such embodiments, a mammalian cell is a human cell (e.g., a human cochlear outer hair cell).

[0499] Methods for introducing any compositions described herein into a mammalian cell are known in the art (e.g., via lipofection or through use of a viral construct, e.g., any viral constructs described herein). In some embodiments, a decrease in expression of an endogenous KCNQ4 gene product is determined, e.g., as compared to a control or to a level of expression of a KCNQ4 gene product prior to introduction of a composition as described herein. In some embodiments a decrease in an endogenous KCNQ4 gene product occurs concomitantly or sequentially with an increase in a codon-optimized KCNQ4 gene product.

e. Methods of Decreasing Expression of a Loss-of-Function KCNQ4 Variant

[0500] The present disclosure provides methods of decreasing expression of a loss-of-function KNCQ4 variant gene product in a cell (e.g., a mammalian cell). In some such embodiments, such methods comprise introducing any compositions (e.g., an inhibitory nucleic acid) described herein into a cell (e.g., a mammalian cell). In some embodiments, introduction is in vitro. In some embodiments, introduction is ex vivo. In some embodiments, introduction is in vivo.

[0501] In some such embodiments, a cell is a mammalian cell. In some embodiments, a mammalian cell is a cochlear cell. In some embodiments, a cochlear cell is a hair cell. In some embodiments, a cochlear hair cell is an inner hair cell. In some embodiments, a cochlear hair cell is an outer hair cell. In some such embodiments, a mammalian cell is a human cell (e.g., a human cochlear outer hair cell).

[0502] Methods for introducing any compositions described herein into a mammalian cell are known in the art (e.g., via lipofection or use of a viral construct, e.g., any viral constructs described herein). A decrease in expression of a KCNQ4 variant gene product is determined, e.g., as compared to a control or to a level of expression of a KCNQ4 variant gene product prior to introduction of a composition as described herein. In some embodiments a decrease in KCNQ4 variant occurs concomitantly or sequentially with an increase in functional KCNQ4.

### 5. Administration

[0503] Provided herein are technologies comprising, among other things, therapeutic delivery systems for treating hearing loss (e.g., nonsyndromic sensorineural hearing loss or syndromic sensorineural hearing loss). In some embodiments the present disclosure provides compositions that are part of or comprise at least one construct, e.g., viral construct, e.g., AAV construct. In some embodiments, an inhibitory nucleic acid of the present disclosure is included within or comprises at least one construct. In some such embodiments, a construct is an AAV construct. In some embodiments, an AAV construct is used to deliver an inhibitory nucleic acid to one or more cells. In some embodiments, an inhibitory nucleic acid is included within or comprises at least one construct. In some such embodiments, a construct is an AAV construct. In some embodiments, an AAV construct is used to deliver an inhibitory nucleic acid to one or more cells. In some such embodiments, a construct encodes an inhibitory nucleic acid that may, in some embodiments, decrease expression of a potassium channel gene product, e.g., a potassium channel mRNA, e.g., KCNQ4 mRNA). In some embodiments, a single construct encodes more than one inhibitory nucleic acid molecule (e.g., more than one miRNA targeting sequence, etc.). In some embodiments, a single construct encodes 2, 3, 4, 5, 6, 7, 8, 9, or 10 inhibitory nucleic acid molecules.

[0504] Non-limiting examples of siRNAs that can decrease expression of a potassium channel gene product (e.g., protein) in a cell (e.g., a human cell, e.g., an outer hair cell) are described herein. As described herein, in some embodiments, a subject has been previously identified as having a loss-of-function KCNQ4 variant (e.g., a KCNQ4 gene having a sequence variation that results in a defect (e.g., decrease) in expression and/or activity of a KCNQ4 protein encoded by a gene or in a function that causes disease (e.g., DFNA2 or another dysfunction in a potassium channel, e.g., chronic depolarization leading to death). In some embodiments, prior to an introducing or administering step as provided herein, a subject is determined to have a KCNQ4 variant gene. In some embodiments, a method of treatment comprises detecting a variation in a KCNQ4 gene in a subject. In some embodiments, a method of treating comprises identifying or diagnosing a subject as having non-symptomatic sensorineural hearing loss.

[0505] As described herein, technologies provided by the present disclosure (e.g., expression systems, inhibitory RNAs or genome editing systems, etc.) can be implemented (e.g., administered or delivered to a cell or a subject) in a variety of ways, and different implementations may be suitable for distinct applications. For example, in some embodiments, technologies of the present disclosure are used to increase a level of a gene, decrease a level of a gene, and/or increase and decrease levels of certain genes or gene variants, simultaneously. For example, in some embodiments, technologies of the present disclosure include increasing expression of a functional KCNQ4 gene product, decreasing expression of a loss-of-function KCNQ4 gene variant, replacing a functional KCNQ4 gene product with a codon-optimized version of a KCNQ4 gene product, or any combination of increasing and decreasing thereof.

a. Routes of Administration

[0506] In some embodiments, the present disclosure provides various routes of and formulations for administration. As will be known to one of skill in the art, pharmaceutical forms suitable for injectable use include sterile aqueous solutions or dispersions and sterile powders for extemporaneous preparation of sterile injectable solutions or dispersions. Dispersions may also be prepared in glycerol, liquid polyethylene glycols, and mixtures thereof and in oils.

[0507] Under ordinary conditions of storage and use, these preparations contain a preservative to prevent growth of microorganisms. In many cases the form is sterile and fluid to the extent that easy syringability exists. It must be stable under the conditions of manufacture and storage and must be preserved against contaminating action of microorganisms, such as bacteria and fungi. In some embodiments, a carrier can be a solvent or dispersion medium containing, for example, water, ethanol, polyol (e.g., glycerol, propylene glycol, and liquid polyethylene glycol, and the like), suitable mixtures thereof, and/or vegetable oils. Proper fluidity may be maintained, for example, by use of a coating, such as lecithin, by maintenance of the required particle size in the case of dispersion and by use of surfactants. Prevention of action of microorganisms can be brought about by various antibacterial and antifungal agents, for example, parabens, chlorobutanol, phenol, sorbic acid, thimerosal, and the like. In many cases, it will be preferable to include isotonic agents, for example, sugars or sodium chloride.

[0508] Prolonged absorption of injectable compositions can be brought about use in compositions of agents delaying absorption, for example, aluminum monostearate and gelatin. For administration of an injectable aqueous solution, for example, a solution may be suitably buffered, if necessary, and a liquid diluent first rendered isotonic with sufficient saline or glucose. These particular aqueous solutions are especially suitable for intravenous, intramuscular, subcutaneous and intraperitoneal administration. In this connection, a sterile aqueous medium that can be employed will be known to those of skill in the art. For example, one dosage may be dissolved in 1 ml of isotonic NaCl solution and either added to 1000 ml of hypodermoclysis fluid or injected at a proposed site of infusion, (see for example, “Remington's Pharmaceutical Sciences” 15th Edition, pages 1035-1038 and 1570-1580, which is incorporated in its entirety herein by reference). Some variation in dosage will necessarily occur depending on condition of a host. A person responsible for administration will, in any event, determine an appropriate dose for an individual host.

[0509] In some embodiments, sterile injectable solutions are prepared by incorporating active rAAV in a required amount in an appropriate solvent with various other ingredients enumerated herein, as required, followed by filtered sterilization. Generally, dispersions are prepared by incorporating various sterilized active ingredients into a sterile vehicle which contains basic dispersion medium and required other ingredients from those enumerated above. In the case of sterile powders for preparation of sterile injectable solutions, in some embodiments, preferred methods of preparation are vacuum-drying and freeze-drying techniques which yield a powder of active ingredient plus any additional desired ingredient from a previously sterile-filtered solution thereof.

[0510] In some embodiments, rAAV compositions disclosed herein may also be formulated in a neutral or salt form. Pharmaceutically-acceptable salts, include acid addition salts (formed with free amino groups of a given protein) and which are formed with inorganic acids such as, for example, hydrochloric or phosphoric acids, or such organic acids as acetic, oxalic, tartaric, mandelic, and the like. Salts formed with free carboxyl groups can also be derived from inorganic bases such as, for example, sodium, potassium, ammonium, calcium, or ferric hydroxides, and such organic bases as isopropylamine, trimethylamine, histidine, procaine and the like. Upon formulation, solutions can be administered in a manner compatible with the dosage formulation and in such amount as is therapeutically effective. Formulations are easily administered in a variety of dosage forms such as injectable solutions, drug-release capsules, and the like.

[0511] Delivery vehicles such as liposomes, nanocapsules, microparticles, microspheres, lipid particles, vesicles, and the like, may be used for introduction of compositions of the present disclosure into suitable host cells. In particular, in some embodiments, rAAV-construct delivered transgenes may be formulated for delivery either encapsulated in a lipid particle, a liposome, a vesicle, a nanosphere, or a nanoparticle or the like.

[0512] Such formulations may be preferred for introduction of pharmaceutically acceptable formulations of nucleic acids or rAAV constructs disclosed herein. Formation and use of liposomes is generally known to those of skill in the art. Recently, liposomes were developed with improved serum stability and circulation half-times (U.S. Pat. No. 5,741,516, which is incorporated in its entirety herein by reference). Further, various methods of liposome and liposome like preparations as potential drug carriers have been described (U.S. Pat. Nos. 5,567,434; 5,552,157; 5,565,213; 5,738,868 and 5,795,587, each of which is incorporated in its entirety herein by reference).

[0513] Liposomes have been used successfully with a number of cell types that are normally resistant to transfection by other procedures. In addition, liposomes are free of DNA length constraints that are typical of viral-based delivery systems. Liposomes have been used effectively to introduce genes, drugs, radiotherapeutic agents, viruses, transcription factors and allosteric effectors into a variety of cultured cell lines and animals. In addition, several successful clinical trials examining efficacy of liposome-mediated drug delivery have been completed.

[0514] Liposomes are formed from phospholipids that are dispersed in an aqueous medium and spontaneously form multilamellar concentric bilayer vesicles (also termed multilamellar vesicles (MLVs). MLVs generally have diameters of from 25 nm to 4 τm. Sonication of MLVs results in formation of small unilamellar vesicles (SUVs) with diameters in a range of approximately 200 to 500 .ANG., containing an aqueous solution in the core.

[0515] Alternatively, nanocapsule formulations of rAAV may be used. Nanocapsules can generally entrap substances in a stable and reproducible way. To avoid side effects due to intracellular polymeric overloading, such ultrafine particles (sized around 0.1 τm) should be designed using polymers able to be degraded in vivo. Biodegradable polyalkyl-cyanoacrylate nanoparticles that meet these requirements are contemplated for use.

[0516] In addition to methods of delivery described above, the following techniques are also contemplated as alternative methods of delivering the rAAV compositions to a host. Sonophoresis (i.e., ultrasound) has been used and described in U.S. Pat. No. 5,656,016, which is incorporated in its entirety herein by reference, as a device for enhancing the rate and efficacy of drug permeation into and through a circulatory system. Other drug delivery alternatives contemplated are intraosseous injection (U.S. Pat. No. 5,779,708, which is incorporated in its entirety herein by reference), microchip devices (U.S. Pat. No. 5,797,898, which is incorporated in its entirety herein by reference), ophthalmic formulations (Bourlais et al., 1998, which is incorporated in its entirety herein by reference), transdermal matrices (U.S. Pat. Nos. 5,770,219 and 5,783,208, each of which is incorporated in its entirety herein by reference) and feedback-controlled delivery (U.S. Pat. No. 5,697,899, which is incorporated in its entirety herein by reference).

[0517] In some embodiments, administration of any compositions of the present disclosure may be carried out in any convenient manner, including by aerosol inhalation, injection, ingestion, transfusion, implantation or transplantation. Compositions described herein may be administered to a patient trans arterially, subcutaneously, intradermally, intranodally, intramedullary, intramuscularly, by intravenous (i.v.) injection, or intraperitoneally. In some embodiments, a nucleic acid composition of the present disclosure is administered to a patient by intradermal or subcutaneous injection. In some embodiments, a nucleic composition of the present disclosure is administered by i.v. injection. In some embodiments, administration of any compositions of the present disclosure may be carried out by administration into or through the round window membrane of an inner ear of a subject. In some embodiments, administration of any compositions of the present disclosure may be carried out by administration into perilymph fluid of an inner ear. In some embodiments, any compositions of the present disclosure may be formulated for administration into or through the round window membrane of an inner ear of a subject. In some embodiments, any compositions of the present disclosure may be formulated for administration into perilymph fluid of an inner ear.

b. Dosing
i. rAAV-KCNQ4-Inhibitory-RNA

[0518] In some embodiments, any of the methods disclosed herein comprise a dose-escalation study to assess safety and tolerability in subjects, e.g., mammals, e.g., humans, e.g., patients, with hearing loss. In some embodiments, a composition disclosed herein, e.g., rAAV-KCNQ4-Inhibitory-RNA, is administered at a dosing regimen disclosed herein. In some embodiments, the dosing regimen comprises either unilateral or bilateral intracochlear administrations of a dose, e.g., as described herein, of a composition disclosed herein, e.g., rAAV-KCNQ4-Inhibitory-RNA. In some embodiments, the dosing regimen comprises delivery in a volume of at least 0.001 mL, 0.005 mL, 0.01 mL, at least 0.02 mL, at least 0.03 mL, at least 0.04 mL, at least 0.05 mL, at least 0.06 mL, at least 0.07 mL, at least 0.08 mL, at least 0.09 mL, at least 0.10 mL, at least 0.11 mL, at least 0.12 mL, at least 0.13 mL, at least 0.14 mL, at least 0.15 mL, at least 0.16 mL, at least 0.17 mL, at least 0.18 mL, at least 0.19 mL, or at least 0.20 mL per cochlea. In some embodiments, the dosing regimen comprises delivery in a volume of at most 0.30 mL, at most 0.25 mL, at most 0.20 mL, at most 0.15 mL, at most 0.14 mL, at most 0.13 mL, at most 0.12 mL, at most 0.11 mL, at most 0.10 mL, at most 0.09 mL, at most 0.08 mL, at most 0.07 mL, at most 0.06 mL, at most 0.05 mL, at most 0.01 mL, at most 0.005 mL, or at most 0.001 mL per cochlea. In some embodiments, the dosing regimen comprises delivery in a volume of about 0.001 mL, 0.005 mL, 0.01 mL, 0.05 mL, about 0.06 mL, about 0.07 mL, about 0.08 mL, about 0.09 mL, about 0.10 mL, about 0.11 mL, about 0.12 mL, about 0.13 mL, about 0.14 mL, or about 0.15 mL per cochlea, depending on the population. In some embodiments, the dosing regimen comprises delivery in a volume of at least 0.001 mL, 0.005 mL, 0.01 mL, at least 0.02 mL, at least 0.03 mL, at least 0.04 mL, at least 0.05 mL, at least 0.06 mL, at least 0.07 mL, at least 0.08 mL, at least 0.09 mL, at least 0.10 mL, at least 0.11 mL, at least 0.12 mL, at least 0.13 mL, at least 0.14 mL, at least 0.15 mL, at least 0.16 mL, at least 0.17 mL, at least 0.18 mL, at least 0.19 mL, or at least 0.20 mL per cochlea. In some embodiments, the dosing regimen comprises delivery in a volume of at most 0.30 mL, at most 0.25 mL, at most 0.20 mL, at most 0.15 mL, at most 0.14 mL, at most 0.13 mL, at most 0.12 mL, at most 0.11 mL, at most 0.10 mL, at most 0.09 mL, at most 0.08 mL, at most 0.07 mL, at most 0.06 mL, at most 0.05 mL, at most 0.01 mL, at most 0.005 mL, or at most 0.001 mL per cochlea. In some embodiments, the dosing regimen comprises delivery in a volume of about 0.001 mL, about 0.005 mL, about 0.01 mL, 0.05 mL, about 0.06 mL, about 0.07 mL, about 0.08 mL, about 0.09 mL, about 0.10 mL, about 0.11 mL, about 0.12 mL, about 0.13 mL, about 0.14 mL, or about 0.15 mL per cochlea, depending on the population.

[0519] In some embodiments, a method disclosed herein evaluates the safety and tolerability of escalating doses of a composition disclosed herein, e.g., rAAV-KCNQ4-Inhibitory-RNA, administered via intracochlear injection to a subject, e.g., 18 to 80 years of age, with hearing loss.

[0520] In some embodiments, a method disclosed herein evaluates the safety and tolerability of escalating doses of a composition disclosed herein, e.g., rAAV-KCNQ4-Inhibitory-RNA, administered via intraocular injection to a subject, e.g., 18 to 80 years of age, with hearing loss.

[0521] In some embodiments, any of the methods disclosed herein comprise an evaluation of the safety and tolerability of a composition disclosed herein, e.g., rAAV-KCNQ4-Inhibitory-RNA. In some embodiments, evaluation of the efficacy of a composition disclosed herein, e.g., rAAV-KCNQ4-Inhibitory-RNA to treat hearing loss, is performed in a randomized, controlled setting (using a concurrent, non-intervention observation arm).

[0522] In some embodiments, any of the methods disclosed herein comprise an evaluation of the safety and tolerability of a composition disclosed herein, e.g., rAAV-KCNQ4-Inhibitory-RNA. In some embodiments, evaluation of the efficacy of a composition disclosed herein, e.g., rAAV-KCNQ4-Inhibitory-RNA to treat vision loss, is performed in a randomized, controlled setting (using a concurrent, non-intervention observation arm).

iii. rAAV-KCNQ4

[0523] In some embodiments, any of the methods disclosed herein comprise a dose-escalation study to assess safety and tolerability in subjects, e.g., mammals, e.g., humans, e.g., patients, with hearing loss. In some embodiments, a composition disclosed herein, e.g., rAAV-KCNQ4, is administered at a dosing regimen disclosed herein. In some embodiments, the dosing regimen comprises either unilateral or bilateral intracochlear administrations of a dose, e.g., as described herein, of a composition disclosed herein, e.g., rAAV-KCNQ4 In some embodiments, the dosing regimen comprises delivery in a volume of at least 0.001 mL, 0.005 mL, 0.01 mL, at least 0.02 mL, at least 0.03 mL, at least 0.04 mL, at least 0.05 mL, at least 0.06 mL, at least 0.07 mL, at least 0.08 mL, at least 0.09 mL, at least 0.10 mL, at least 0.11 mL, at least 0.12 mL, at least 0.13 mL, at least 0.14 mL, at least 0.15 mL, at least 0.16 mL, at least 0.17 mL, at least 0.18 mL, at least 0.19 mL, or at least 0.20 mL per cochlea. In some embodiments, the dosing regimen comprises delivery in a volume of at most 0.30 mL, at most 0.25 mL, at most 0.20 mL, at most 0.15 mL, at most 0.14 mL, at most 0.13 mL, at most 0.12 mL, at most 0.11 mL, at most 0.10 mL, at most 0.09 mL, at most 0.08 mL, at most 0.07 mL, at most 0.06 mL, at most 0.05 mL, at most 0.01 mL, at most 0.005 mL, or at most 0.001 mL per cochlea. In some embodiments, the dosing regimen comprises delivery in a volume of about 0.001 mL, 0.005 mL, 0.01 mL, 0.05 mL, about 0.06 mL, about 0.07 mL, about 0.08 mL, about 0.09 mL, about 0.10 mL, about 0.11 mL, about 0.12 mL, about 0.13 mL, about 0.14 mL, or about 0.15 mL per cochlea, depending on the population. In some embodiments, the dosing regimen comprises delivery in a volume of at least 0.001 mL, 0.005 mL, 0.01 mL, at least 0.02 mL, at least 0.03 mL, at least 0.04 mL, at least 0.05 mL, at least 0.06 mL, at least 0.07 mL, at least 0.08 mL, at least 0.09 mL, at least 0.10 mL, at least 0.11 mL, at least 0.12 mL, at least 0.13 mL, at least 0.14 mL, at least 0.15 mL, at least 0.16 mL, at least 0.17 mL, at least 0.18 mL, at least 0.19 mL, or at least 0.20 mL per cochlea. In some embodiments, the dosing regimen comprises delivery in a volume of at most 0.30 mL, at most 0.25 mL, at most 0.20 mL, at most 0.15 mL, at most 0.14 mL, at most 0.13 mL, at most 0.12 mL, at most 0.11 mL, at most 0.10 mL, at most 0.09 mL, at most 0.08 mL, at most 0.07 mL, at most 0.06 mL, at most 0.05 mL, at most 0.01 mL, at most 0.005 mL, or at most 0.001 mL per cochlea. In some embodiments, the dosing regimen comprises delivery in a volume of about 0.001 mL, about 0.005 mL, about 0.01 mL, 0.05 mL, about 0.06 mL, about 0.07 mL, about 0.08 mL, about 0.09 mL, about 0.10 mL, about 0.11 mL, about 0.12 mL, about 0.13 mL, about 0.14 mL, or about 0.15 mL per cochlea, depending on the population.

[0524] In some embodiments, a method disclosed herein evaluates the safety and tolerability of escalating doses of a composition disclosed herein, e.g., rAAV-KCNQ4, administered via intracochlear injection to a subject, e.g., 18 to 80 years of age, with hearing loss.

[0525] In some embodiments, a method disclosed herein evaluates the safety and tolerability of escalating doses of a composition disclosed herein, e.g., rAAV-KCNQ4, administered via intraocular injection to a subject, e.g., 18 to 80 years of age, with hearing loss.

[0526] In some embodiments, any of the methods disclosed herein comprise an evaluation of the safety and tolerability of a composition disclosed herein, e.g., rAAV-KCNQ4. In some embodiments, evaluation of the efficacy of a composition disclosed herein, e.g., rAAV-KCNQ4 to treat hearing loss, is performed in a randomized, controlled setting (using a concurrent, non-intervention observation arm).

[0527] In some embodiments, any of the methods disclosed herein comprise an evaluation of the safety and tolerability of a composition disclosed herein, e.g., rAAV-KCNQ4. In some embodiments, evaluation of the efficacy of a composition disclosed herein, e.g., rAAV-KCNQ4 to treat vision loss, is performed in a randomized, controlled setting (using a concurrent, non-intervention observation arm).

### 6. Delivery Strategies

a. Nucleic Acid-Based Delivery of Inhibitory RNAs or Genome Editing Systems

[0528] In some embodiments, a genome editing system is implemented for one or more nucleic acids encoding a CRISPR nuclease and gRNA components described herein (optionally with one or more additional components). In some embodiments, a genome editing system is implemented as one or more constructs comprising such nucleic acids, for instance a viral construct such as an adeno-associated virus; and in some embodiments, a genome editing system is implemented as a combination of any of the foregoing. Additional or modified implementations that operate according to principles set forth herein will be apparent to the skilled artisan and are within the scope of this disclosure.

[0529] In one non-limiting embodiment, a construct drives expression of a genome editing system. The art is replete with suitable constructs that are useful in the present invention. Constructs to be used are suitable for replication and, optionally, integration in eukaryotic cells. Typical constructs contain transcription and translation terminators, initiation sequences, and promoters useful for regulation of expression of a desired nucleic acid sequence. Constructs of the present invention may also be used for nucleic acid standard gene delivery protocols. Methods for gene delivery are known in the art (U.S. Pat. Nos. 5,399,346, 5,580,859 & 5,589,466, incorporated by reference herein in their entireties).

[0530] CRISPR/Cas gene disruption occurs when a guide nucleic acid sequence specific for a target gene and a Cas endonuclease are introduced into a cell and form a complex that enables a Cas endonuclease to introduce a double strand break at a target gene. In some embodiments, a CRISPR system comprises an expression construct, such as, but not limited to, an pAd5F35-CRISPR construct. In other embodiments, the Cas expression construct induces expression of Cas9 endonuclease. Other endonucleases may also be used, including but not limited to Cpf1, T7, Cas3, Cas8a, Cas8b, Cas10d, Cse1, Csy1, Csn2, Cas4, Cas10, Csm2, Cmr5, Fok1, other nucleases known in the art, and any combination thereof.

[0531] In some embodiments, inducing a Cas expression construct comprises exposing a cell to an agent that activates an inducible promoter in a Cas expression construct. In such embodiments, a Cas expression construct includes an inducible promoter, such as one that is inducible by exposure to an antibiotic (e.g., by tetracycline or a derivative of tetracycline, for example doxycycline). However, it should be appreciated that other inducible promoters can be used. An inducing agent can be a selective condition (e.g., exposure to an agent, for example an antibiotic) that results in induction of an inducible promoter. This results in expression of a Cas expression construct.

[0532] In other embodiments, one or more constructs driving expression of one or more elements of a CRISPR system are introduced into a host cell, such that expression of elements of a CRISPR system direct formation of a CRISPR complex at one or more target sites. For example, a Cas enzyme, a guide sequence linked to a tracr-mate sequence, and a tracr sequence could each be operably linked to separate regulatory elements on separate constructs. Alternatively, two or more elements expressed from the same or different regulatory elements may be combined in a single construct, with one or more additional constructs providing any components of a CRISPR system not included in a first construct. CRISPR system elements that are combined in a single construct may be arranged in any suitable orientation, such as one element located 5′ with respect to (“upstream” of) or 3′ with respect to (“downstream” of) a second element. A coding sequence of one element may be located on the same or opposite strand of a coding sequence of a second element, and oriented in the same or opposite direction. In some embodiments, a single promoter drives expression of a transcript encoding a CRISPR enzyme and one or more of a guide sequence, tracr mate sequence (optionally operably linked to a guide sequence), and a tracr sequence embedded within one or more intron sequences (e.g., each in a different intron, two or more in at least one intron, or all in a single intron).

b. Viral Delivery of Genome Modifying Systems and/or Transgenes

[0533] In some embodiments, a construct may be provided to a cell in the form of a viral construct, e.g., an AAV construct. In some embodiments, a genome editing system is implemented using one or more constructs comprising such nucleic acids, for instance a viral construct such as an adeno-associated virus; and in some embodiments, a genome editing system is implemented as a combination of any of the foregoing. In some embodiments, a transgene, e.g., a gene encoding KCNQ4 (e.g., a functional KCNQ4) is administered using a viral construct. Viral construct technology is well known in the art and is described, for example, in Sambrook et al. (4^{th} Edition, Molecular Cloning: A Laboratory Manual, Cold Spring Harbor Laboratory, New York, 2012, which is incorporated in its entirety herein by reference), and in other virology and molecular biology manuals. Viruses, which are useful as constructs include, but are not limited to, retroviruses, adenoviruses, adeno-associated viruses, herpes viruses, Sindbis virus, gammaretrovirus and lentiviruses. In general, a suitable construct contains an origin of replication functional in at least one organism, a promoter sequence, convenient restriction endonuclease sites, and one or more selectable markers (e.g., WO 01/96584; WO 01/29058; and U.S. Pat. No. 6,326,193, each of which is incorporated in its entirety herein by reference). In some embodiments, the present disclosure provides methods of delivery comprising administering one or more constructs comprising one or more components that inhibit a KCNQ4 variant gene product and/or one or more constructs comprising one or more components that express an exogenous KCNQ4 (e.g., a functional KCNQ4, e.g., a wild type KCNQ4, e.g., a codon optimized KCNQ4) gene product. Without being bound by any particular theory, in embodiments where viral delivery of components to inhibit a KCNQ4 variant and express functional KCNQ4, a functional KCNQ4 is codon-optimized to resist impact of KCNQ4 inhibitory components that may exist and/or be introduced into a cell or subject into which or whom they were delivered (e.g., inhibitory nucleic acid, e.g., miRNA).

### 7. Devices and Surgical Methods

[0534] The present disclosure provides, among other things technologies (e.g., systems, methods, devices, etc.) that may be used, in some embodiments, for treating deafness and other hearing-associated diseases, disorders and conditions. Examples of such technologies are also included in, e.g., WO2017223193 and WO2019084145, each of which is herein incorporated by reference in its entirety. In some embodiments, for example, the present disclosure provides therapeutic delivery systems for treating hearing loss (e.g., nonsyndromic sensorineural hearing loss or syndromic sensorineural hearing loss). In some such embodiments, a therapeutic delivery system may include: (i) a medical device capable of creating one or a plurality of incisions in a round window membrane of an inner ear of a subject, and (ii) an effective dose of a composition (e.g., any compositions described herein). In some embodiments, a medical device includes a plurality of micro-needles.

[0535] AAV constructs are capable of constituting a full-length auditory polypeptide messenger RNA in a target cell of an inner ear. In some embodiments, the present disclosure provides a means for performing a surgical method, a method including the steps of: administering intra-cochlearly to a human subject in need thereof an effective dose of a therapeutic composition of the present disclosure. A therapeutic composition is capable of being administered by using a medical device including: a) means for creating one or a plurality of incisions in a round window membrane, and b) an effective dose of a therapeutic composition.

[0536] The present disclosure provides, among other things, surgical methods for treatment (e.g., prevention, reversal, mitigation, attenuation) of hearing loss. In one aspect, methods include the steps of introducing into a cochlea of a human subject a first incision at a first incision point; and administering intra-cochlearly an effective dose of a therapeutic composition (e.g., any compositions described herein) as provided herein. In one embodiment, a therapeutic composition (e.g., any compositions described herein) is administered to a subject at a first incision point. In some embodiments, a therapeutic composition is administered to a subject into or through a first incision. In one embodiment, a therapeutic composition is administered to a subject into or through a cochlea oval window membrane. In one embodiment, a therapeutic composition is administered to a subject into or through a cochlea round window membrane.

[0537] For example, in some embodiments, a therapeutic composition is administered using a medical device capable of creating a plurality of incisions in a round window membrane. In some embodiments, a medical device includes a plurality of micro-needles. In some embodiments, a medical device includes a plurality of micro-needles including a generally circular first aspect, wherein each micro-needle includes a diameter of at least about 10 microns. In some embodiments, a medical device includes a base and/or a reservoir capable of holding a therapeutic composition. In some embodiments, a medical device includes a plurality of hollow micro-needles individually including a lumen capable of transferring a therapeutic composition. In some embodiments, a medical device includes a means for generating at least a partial vacuum.

a. Method of Introduction into Cochlea

[0538] The present disclosure provides, among other things, a method of introducing into a cochlea of a mammal (e.g., a human) a therapeutically effective amount of any compositions or systems as described herein. Also provided are methods of increasing expression of a functional KCNQ4 protein (e.g., a KCNQ4 protein that can be part of a functional potassium channel, e.g., a potassium channel that does not result in chronically depolarized cells, e.g., outer hair cells) in a cell (e.g., a hair cell, e.g., an outer hair cell) in a cochlea of a mammal (e.g., a human) that include introducing into a cochlea of a subject a therapeutically effective amount of any compositions described herein.

[0539] Also provided are methods of treating non-symptomatic sensorineural hearing loss in a subject (e.g., a human) identified as having a defective (i.e., non-functional) KCNQ4 gene product. In some such embodiments, methods include administering a therapeutically effective amount of any compositions described herein into a cochlea of a subject. In some embodiments, administration may include administering one or more compositions (e.g., one composition comprising an inhibitory nucleic acid and another composition comprising a construct encoding a functional KCNQ4; e.g., one composition comprising a construct encoding a functional KCNQ4 and another composition comprising a growth factor or other agent that will maintain ear hair cell health, etc.). In some embodiments, methods of treating may further comprise administering a cochlear implant to a subject (e.g., at substantially the same time as any compositions described herein are administered to a subject).

[0540] In some embodiments a method of treating comprises administering two or more doses of any compositions described herein. In some such embodiments, compositions are introduced or administered into a cochlea of a mammal or subject. In some embodiments a method of treating comprises introducing or administering a first dose of a composition into a cochlea of a subject, assessing hearing function of a subject following introducing or administering of a first dose, and administering at least one additional dose of a composition into a cochlea of a subject if a subject is found not to have a hearing function within a normal range (e.g., as determined using any test for hearing known in the art).

[0541] In some embodiments a method of treatment comprises intra-cochlear administration. In some such embodiments of any methods described herein, compositions are administered through use of a medical device (e.g., any exemplary medical devices described herein). In some embodiments, intra-cochlear administration can be performed as described herein or known in the art. For example, in some embodiments, a composition can be administered or introduced into a cochlea using the following surgical technique: first using visualization with a 0 degree, 2.5-mm rigid endoscope, an external auditory canal is cleared and a round knife is used to sharply delineate an approximately 5-mm tympanomeatal flap. A tympanomeatal flap is then elevated and the middle ear is entered posteriorly. The chorda tympani nerve is identified and divided, and a currette is used to remove the scutal bone, exposing the round window membrane. To enhance apical distribution of the administered or introduced composition, a surgical laser may be used to make a small 2-mm fenestration in the oval window to allow for perilymph displacement during trans-round window membrane infusion of the composition. The microinfusion device is then primed and brought into the surgical field. The device is maneuvered to the round window, and the tip is seated within the bony round window overhang to allow for penetration of the membrane by the microneedle(s). The footpedal is engaged to allow for a measured, steady infusion of the composition. The device is then withdrawn and the round window and stapes foot plate are sealed with a gelfoam patch. One of skill in the art will understand that other variations or methods of intra-cochlear administration are available. In some embodiments, any such acceptable methods may be used to deliver one or more compositions and/or treat one or more subjects as described herein.

[0542] In some embodiments, an exemplary device for use in any of the methods disclosed herein is described in FIGS. 32-35. FIG. 35 illustrates an exemplary device 10 for delivering fluid to an inner ear. Device 10 includes a knurled handle 12, and a distal handle adhesive 14 (for example, an epoxy such as Loctite 4014) that couples to a telescoping hypotube needle support 24. The knurled handle 12 (or handle portion) may include kurling features and/or grooves to enhance the grip. The knurled handle 12 (or handle portion) may be from about 5 mm to about 15 mm thick or from about 5 mm to about 12 mm thick, or from about 6 mm to about 10 mm thick, or from about 6 mm to about 9 mm thick, or from about 7 mm to about 8 mm thick. The knurled handle 12 (or handle portion) may be hollow such that fluid may pass through the device 10 during use. The device 10 may also include a proximal handle adhesive 16 at a proximal end 18 of the knurled handle 12, a needle sub-assembly 26 (shown in FIG. 33) with stopper 28 (shown in FIG. 33) at a distal end 20 of the device 10, and a strain relief feature 22. Strain relief feature 22 may be composed of a Santoprene material, a Pebax material, a polyurethane material, a silicone material, a nylon material, and/or a thermoplastic elastomer. The telescoping hypotube needle support 24 surrounds and supports a bent needle 38 (shown in FIG. 33) disposed therewithin.

[0543] Referring still to FIG. 32, the stopper 28 may be composed of a thermoplastic material or plastic polymer (such as a UV-cured polymer), as well as other suitable materials, and may be used to prevent the bent needle 38 from being inserted too far into the ear canal (for example, to prevent insertion of bent needle 38 into the lateral wall or other inner ear structure). Device 10 also may include a tapered portion 23 disposed between the knurled handle 12 and the distal handle adhesive 14 that is coupled to the telescoping hypotube needle support 24. The knurled handle 12 (or handle portion) may include the tapered portion 23 at the distal end of the handle portion 12. Device 10 may also include tubing 36 fluidly connected to the proximal end 16 the device 10 and acts as a fluid inlet line connecting the device to upstream components (for example, a pump, a syringe, and/or upstream components which, in some embodiments, may be coupled to a control system and/or power supply (not shown)). In some embodiments, the bent needle 38 (shown in FIG. 33) extends from the distal end 20, through the telescoping hypotube needle support 24, through the tapered portion 23, through the knurled handle 12, and through the strain relief feature 22 and fluidly connects directly to the tubing 36. In other embodiments, the bent needle 38 fluidly connects with the hollow interior of the knurled handle (for example, via the telescoping hypotube needle support 24) which in turn fluidly connects at a proximal end 16 with tubing 36. In embodiments where the bent needle 38 does not extend all the way through the interior of the device 10, the contact area (for example, between overlapping nested hypotubes 42), the tolerances, and/or sealants between interfacing components must be sufficient to prevent therapeutic fluid from leaking out of the device 10 (which operates at a relatively low pressure (for example, from about 1 Pascal to about 50 Pa, or from about 2 Pa to about 20 Pa, or from about 3 Pa to about 10 Pa)).

[0544] FIG. 33 illustrates a sideview of the bent needle sub-assembly 26, according to aspects of the present disclosed embodiments. Bent needle sub-assembly 26 includes a needle 38 that has a bent portion 32. Bent needle sub-assembly 26 may also include a stopper 28 coupled to the bent portion 32. The bent portion 32 includes an angled tip 34 at the distal end 20 of the device 10 for piercing a membrane of the ear (for example, the RWM). The needle 38, bent portion 32, and angled top 34 are hollow such that fluid may flow therethrough. The angle 46 (as shown in FIG. 35) of the bent portion 32 may vary. A stopper 28 geometry may be cylindrical, disk-shaped, annulus-shaped, dome-shaped, and/or other suitable shapes. Stopper 28 may be molded into place onto bent portion 32. For example, stopper 28 may be positioned concentrically around the bent portion 32 using adhesives or compression fitting. Examples of adhesives include an UV cure adhesive (such as Dymax 203A-CTH-F-T), elastomer adhesives, thermoset adhesives (such as epoxy or polyurethane), or emulsion adhesives (such as polyvinyl acetate). Stopper 28 fits concentrically around the bent portion 32 such that angled tip 34 is inserted into the ear at a desired insertion depth. The bent needle 38 may be formed from a straight needle using incremental forming, as well as other suitable techniques.

[0545] FIG. 34 illustrates a perspective view of exemplary device 10 for delivering fluid to an inner ear. Tubing 36 may be from about 1300 mm in length (dimension 11 in FIG. 34) to about 1600 mm, or from about 1400 mm to about 1500 mm, or from about 1430 mm to about 1450 mm. Strain release feature 22 may be from about 25 mm to about 30 mm in length (dimension 15 in FIG. 34), or from about 20 mm to about 35 mm in length. Handle 12 may be about 155.4 mm in length (dimension 13 in FIG. 34), or from about 150 mm to about 160 mm, or from about 140 mm to about 170 mm. The telescoping hypotube needle support 24 may have two or more nested hypotubes, for example three nested hypotubes 42A, 42B, and 42C, or four nested hypotubes 42A, 42B, 42C, and 42D. The total length of hypotubes 42A, 42B, 42C and tip assembly 26 (dimension 17 in FIG. 34) may be from about 25 mm to about 45 mm, or from about 30 mm to about 40 mm, or about 35 mm. In addition, telescoping hypotube needle support 24 may have a length of about 36 mm, or from about 25 mm to about 45 mm, or form about 30 mm to about 40 mm. The three nested hypotubes 42A, 42B, and 42C each may have a length of 3.5 mm, 8.0 mm, and 19.8 mm, respectively, plus or minus about 20%. The inner-most nested hypotube (or most narrow portion) of the telescoping hypotube needle support 24 may be concentrically disposed around needle 38.

[0546] FIG. 35 illustrates a perspective view of bent needle sub-assembly 26 coupled to the distal end 20 of device 10, according to aspects of the present disclosed embodiments. As shown in FIG. 35, bent needle sub-assembly 26 may include a needle 38 coupled to a bent portion 32. In other embodiments, the bent needle 38 may be a single needle (for example, a straight needle that is then bent such that it includes the desired angle 46). Needle 38 may be a 33-gauge needle, or may include a gauge from about 32 to about 34, or from about 31 to 35. At finer gauges, care must be taken to ensure tubing 36 is not kinked or damaged. Needle 38 may be attached to handle 12 for safe and accurate placement of needle 38 into the inner ear. As shown in FIG. 35, bent needle sub-assembly 26 may also include a stopper 28 disposed around bent portion 32. FIG. 35 also shows that bent portion 32 may include an angled tip 34 for piercing a membrane of the ear (for example, the RWM). Stopper 28 may have a height 48 of about 0.5 mm, or from about 0.4 mm to about 0.6 mm, or from about 0.3 mm to about 0.7 mm. Bent portion 32 may have a length 52 of about 1.45 mm, or from about 1.35 mm to about 1.55 mm, or from about 1.2 mm to about 1.7 mm. In other embodiments, the bent portion 32 may have a length greater than 2.0 mm such that the distance between the distal end of the stopper 28 and the distal end of the angled tip 34 is from about 0.5 mm to about 1.7 mm, or from about 0.6 mm to about 1.5 mm, or from about 0.7 mm to about 1.3 mm, or from about 0.8 mm to about 1.2 mm. FIG. 35 shows that stopper 28 may have a geometry that is cylindrical, disk-shaped, and/or dome-shaped. A person of ordinary skill will appreciate that other geometries could be used.

[0547] In some embodiments, a delivery approach as disclosed herein comprises a synthetic AAV capsid (e.g., AAV Anc80) for transduction of inner ear cells, and/or a device for targeted delivery directly to the cochlea. In certain embodiments, the present disclosure provides methods and compositions suitable for transduction of inner ear cells.

[0548] In some embodiments of any of the methods described herein, any composition described herein is administered to the subject into or through the cochlea oval window membrane. In some embodiments of any of the methods described herein, any of the compositions described herein is administered to the subject into or through the cochlea round window membrane. In some embodiments of any of the methods described herein, the composition is administered using a medical device capable of creating a plurality of incisions in the round window membrane. In some embodiments, the medical device includes a plurality of micro-needles. In some embodiments, the medical device includes a plurality of micro-needles including a generally circular first aspect, where each micro-needle has a diameter of at least about 10 microns. In some embodiments, the medical device includes a base and/or a reservoir capable of holding the composition. In some embodiments, the medical device includes a plurality of hollow micro-needles individually including a lumen capable of transferring the composition. In some embodiments, the medical device includes a means for generating at least a partial vacuum.

[0549] In some embodiments, also disclosed herein is a sterile, one-time use delivery device for intracochlear administration, to deliver a composition disclosed herein, e.g., rAAV-KCNQ4, e.g., rAAV-KCNQ4-Inhibitory-RNA, to perilymph fluid of inner ear through a round window membrane with a vent located in a stapes footplate. In some embodiments, in this intracochlear administration approach, a composition disclosed herein, e.g., e.g., rAAV-KCNQ4, e.g., rAAV-KCNQ4-Inhibitory-RNA, can be administered into the scala tympani through the round window membrane, with a vent in a stapes footplate within the oval window, such that composition is perfused through scala tympani, then through scala vestibuli via connection at the helicotrema, and follows the fluid path to a vent in a stapes footplate (FIGS. 29A-29B).

### 9. Evaluating Hearing Loss and Recovery

a. Auditory Testing

[0550] In some embodiments, hearing function is determined using auditory brainstem response measurements (ABRs). A decrease in an ABR threshold compared to a reference, the presence (e.g., detection) of an ABR threshold, and/or a normal ABR morphology indicate improved hearing. In some embodiments, hearing is tested by measuring distortion product optoacoustic emissions (DPOAEs). A decrease in an DPOAE threshold compared to a reference, the presence (e.g., detection) of an DPOAE threshold, and/or a normal DPOAE morphology indicate improved hearing. In some such embodiments, measurements are taken from one or both ears of a subject. In some such embodiments, recordings are compared to prior recordings for the same subject and/or known thresholds on such response measurements used to define, e.g., hearing loss versus acceptable hearing ranges to be defined as normal hearing. In some embodiments, a subject has ABR and/or DPOAE measurements recorded prior to receiving any treatment. In some embodiments a subject treated with one or more technologies described herein will have improvements on ABR and/or DPOAE measurements after treatment as compared to before treatment. In some embodiments, ABR and/or DPOAE measurements are taken after treatment is administered and at regular follow-up intervals post-treatment.

[0551] In some embodiments, hearing function is determined using speech pattern recognition or is determined by a speech therapist. In some embodiments, hearing function is determined by pure tone testing. In some embodiments, hearing function is determined by bone conduction testing. In some embodiments, hearing function is determined by acoustic reflex testing. In some embodiments hearing function is determined by tympanometry. In some embodiments, hearing function is determined by any combination of hearing analysis known in the art. In some such embodiments, measurements are taken holistically, and/or from one or both ears of a subject. In some such embodiments, recordings and/or professional analysis are compared to prior recordings and/or analysis for the same subject and/or known thresholds on such response measurements used to define, e.g., hearing loss versus acceptable hearing ranges to be defined as normal hearing. In some embodiments, a subject has speech pattern recognition, pure tone testing, bone conduction testing, acoustic reflex testing and/or tympanometry measurements and/or analysis conducted prior to receiving any treatment.

[0552] In some embodiments a subject treated with one or more technologies described herein will have improvements on speech pattern recognition, pure tone testing, bone conduction testing, acoustic reflex testing and/or tympanometry measurements after treatment as compared to before treatment. In some embodiments, speech pattern recognition, pure tone testing, bone conduction testing, acoustic reflex testing and/or tympanometry measurements are taken after treatment is administered and at regular follow-up intervals post-treatment.

b. Methods of Detecting or Characterizing

[0553] Methods of detecting expression and/or activity of KCNQ4 are known in the art. In some embodiments, level of expression of KCNQ4 protein can be detected directly (e.g., detecting KCNQ4 protein, detecting KCNQ4 mRNA etc.). Non-limiting examples of techniques that can be used to detect expression and/or activity of KCNQ4 directly include, e.g., real-time PCR, Western blotting, immunoprecipitation, immunohistochemistry, or immunofluorescence. In some embodiments, expression of KCNQ4 protein can be detected indirectly (e.g., through functional hearing tests, ABRs, DPOAEs, etc.).

[0554] In some embodiments, tissue samples (e.g., comprising one or more hair cells, e.g., comprising one or more hair cells) can be evaluated for morphology of hair cells before and after administration of any agents (e.g., compositions, e.g., compositions comprising constructs, etc.) as described herein. In some such embodiments, standard immunohistochemical or histological analyses can be performed. In some embodiments, if cells are used in vitro or ex vivo, additional immunocytochemical or immunhistochemical analyses can be performed. In some embodiments, one or more assays of one or more proteins or transcripts (e.g., western blot, ELISA, polymerase chain reactions) can be performed on one or more samples from a subject or an in vitro cell population.

[0555] The disclosure is further described in detail by reference to the following experimental examples. These examples are provided for purposes of illustration only, and are not intended to be limiting unless otherwise specified. Thus, the disclosure should in no way be construed as being limited to the following examples, but rather should be construed to encompass any and all variations that become evident as a result of the teaching provided herein.

[0556] For example, other assays, including those described in the Example section herein as well as those that are known in the art, can also be used in accordance with the present disclosure.

### EXAMPLES

### Example 1: shRNA-Mediated Knockdown of KCNQ4

[0557] The present example demonstrates that knockdown of KCNQ4 can be achieved using shRNA and a reporter construct to measure KCNQ4 expression in human cells (FIG. 2; see also FIG. 4 (top)). FIGS.

[0558] The following shRNA constructs and KCNQ4 constructs were tested in HEK293 cells: sh395, sh909, sh1095, sh1531, sh1593, sh1677, sh1721, and sh1827 (see FIG. 3). The following constructs were tested in HEK293 cells as a positive control (e.g., as a reference for maximum knockdown of KCNQ4 that can be achieved): SaCas9+sgRNA 447Fw+KCNQ4 (lane 11). A shVEGF construct (targeting VEGF) and KCNQ4 construct were tested in HEK293 cells as a negative control (lane 10). In addition, only the KCNQ4 construct was tested in HEK293 cells as a negative control (lane 12). FIG. 3 shows levels of expression of KCNQ4 in HEK293 cells with or without treatment with exemplary shRNA-mediated knockdown (lanes 2-9) and CRISPR-mediated knockdown (lane 11) (N=4 biological replicates) compared to controls (lanes 10 and 12). The level of expression of KCNQ4 was most reduced by sh1827 and sgRNA 447Fw in this example. FIGS. 11 and 12 each show efficacy of knockdown with each of the shRNA constructs as well as an empty shRNA construct (“Mock”). Levels of KCNQ4 were measured using quantitative PCR, normalized to GAPDH. Two independent biological replicates were performed (FIGS. 11 and 12), each of which had three replicates per condition.

### Example 2: miR-Mediated Knockdown of KCNQ4

[0559] The present example describes design of compositions for miR-mediated knockdown of KCNQ4. In addition, the present example demonstrates miR-mediated knockdown of KCNQ4 in human cells using compositions and methods described herein.

### Example 2.1: miRNA Construct Design and Methods

[0560] Eight miRNA targeting constructs for inhibiting KCNQ4 expression were designed using iDesigner (see FIG. 5). The top off-targets for sequences 1, 2, and 4-7 shown in FIG. 30 are displayed in FIG. 31.

[0561] As described herein, miRNA KCNQ4 targeting sequences (based on the KCNQ4 targeting sequences presented in FIG. 30) were engineered into a variety of miRNA scaffolds, and evaluated for efficiency of KCNQ4 knockdown (see FIGS. 2, 4, 7-9). In particular, a KCNQ4-mScarlet knockdown reporter assay (FIG. 7), luciferase reporter assays (FIGS. 8 and 13), and a FLIPR assay were used to assess KCNQ4 knockdown efficiency of microRNA constructs and compositions described herein.

### Example 2.2: Results

[0562] In one experiment, HEK293 cells were contacted with a control or one of fifteen different miRNA constructs targeting KCNQ4 and evaluated using a luciferase reporter assay as described herein (see FIGS. 14A-14B). In particular, six human KCNQ4 targeting sequences within a miR-155 scaffold [miR1-155 (SEQ ID NO: 56), miR2-155 (SEQ ID NO: 57), miR4-155 (SEQ ID NO: 58), miR5-155 (SEQ ID NO: 59), miR6-155 (SEQ ID NO: 60), miR7-155 (SEQ ID NO: 61)], and nine microRNA scaffolds with miR1 targeting sequences [miR1-16 (SEQ ID NO: 62), miR1-26 (SEQ ID NO: 63), miR1-96 (SEQ ID NO: 64), miR1-122 (SEQ ID NO: 65), miR1-135 (SEQ ID NO: 66), miR1-182 (SEQ ID NO: 67), miR1-183 (SEQ ID NO: 68), miR1-335 (SEQ ID NO: 69), miR1-451 (SEQ ID NO: 70)] were tested for KCNQ4 knockdown efficiency (see FIGS. 14A-14B). Immunofluorescent images were captured at 24 and 48 hours post-transfection, and cells were harvested for Dual-Glo Luciferase reporter assay as described by the manufacturer's protocol (Promega). Luminescence was measured for 10 seconds per well from the top of the plate in a standard luminometer.

[0563] Among these constructs, scaffolds exhibiting effective KCNQ4 knockdown included miR-26, miR-16, miR-96, miR-135b, and miR-155 (see FIGS. 14A-14B). The level of KCNQ4 remaining in each of these miRs was about 9.8% (miR-26); 11.4% (miR-16); 13.0% (miR-96); 14.1% (miR-135b); and 14.7% (miR-155). These data also show that, among the constructs tested, KCNQ4 targeting sequences that exhibited effective KCNQ4 knockdown were RNAi_ID6 (SEQ ID NO: 76), RNAi_ID4 (SEQ ID NO: 74), RNAi_ID5 (SEQ ID NO: 75), RNAi_ID2 (SEQ ID NO: 72), and RNAi_ID1 (SEQ ID NO: 71), respectively. The level of KCNQ4 remaining in each condition was RNAi_ID6 (17.7%); RNAi_ID4 (20.9%); RNAi_ID5 (23.7%); RNAi_ID2 (25.3%); and RNAi_ID1 (27.4%).

[0564] These results surprisingly show, for example, that miR-based constructs demonstrated substantially increased efficiency relative to the shRNA (as measured by KCNQ4 knockdown). For instance, when comparing KCNQ4 knockdown efficiency of an shRNA1095 construct (SEQ ID NO: 50) to an miR6 construct (SEQ ID NO: 211) (each of which comprise a KCNQ4 targeting sequence (SEQ ID NO: 95)), the efficiency of the miR6 construct was increased as compared to the shRNA construct (see, e.g., FIG. 3 vs FIGS. 14A-14B).

[0565] miR-mediated knockdown of KCNQ4 using a set of thirty-three miRNA compositions was also evaluated using a dual luciferase reporter assay (see TABLE 3). HEK cells (seeded at 4×10⁴ cells/well) were transfected with 600 ng of exemplary human microRNA plasmid DNA or control CAG.GFP plasmid DNA, and 400 ng of Dual Luciferase reporter DNA. Two days post-transfection, a dual luciferase assay (Promega) was run following standard protocols, and luciferase signals were read on a standard plate reader. FIG. 15 shows Renilla luciferase signals normalized to Firefly luciferase signals, and then normalized to an CAG.EGFP control plasmid (N=4; also see TABLE 3). A variety of levels of KCNQ4 knockdown with microRNA plasmids was observed, ranging from almost no knockdown to nearly 80% knockdown (see FIG. 15).

TABLE 3
Results of miR-mediated knockdown of KCNQ4 using scaffolds
and targeting sequences described herein.

| MIRNA | ID | AVERAGE | ST DEV | ST ERROR |
|---|---|---|---|---|
| CAG.EGFP | CAG | 100.0% | 0 | 0 |
| miR2i _miR5u-26** | 30 | 21.4% | 7.7% | 3.8% |
| miR6-26** | 20 | 28.0% | 6.3% | 3.1% |
| miR2i_miR5u-16** | 24 | 30.1% | 2.2% | 1.1% |
| miR5i_miR6u-26** | 34 | 30.2% | 7.7% | 3.8% |
| miR4i_miR6u-26** | 33 | 32.3% | 9.2% | 4.6% |
| miR2i_miR6u-26** | 31 | 33.4% | 9.3% | 4.6% |
| miR4i_miR5u-26** | 32 | 34.2% | 6.1% | 3.1% |
| miR1-26 | 22 | 35.9% | 4.6% | 2.3% |
| miR2-26** | 11 | 36.9% | 14.7% | 7.4% |
| miR4i_miR6u-96** | 5 | 38.3% | 8.9% | 4.5% |
| miR2i_miR6u-96 | 3 | 39.0% | 5.3% | 2.7% |
| miR2i_miR4u-26 | 29 | 39.9% | 7.5% | 3.8% |
| miR4i miR5u-16 | 26 | 40.3% | 8.4% | 4.2% |
| miR2-16 | 10 | 42.0% | 21.7% | 10.9% |
| miR5i_miR6u-96 | 6 | 42.2% | 11.2% | 5.6% |
| miR2-96 | 12 | 43.6% | 4.9% | 2.5% |
| miR6-96 | 21 | 45.0% | 10.9% | 5.5% |
| miR2i_miR4u-16 | 23 | 45.1% | 8.7% | 4.3% |
| miR1-16 | 7 | 45.6% | 7.7% | 3.9% |
| miR5-26 | 17 | 46.7% | 9.9% | 5.0% |
| miR4-16 | 13 | 47.0% | 11.4% | 5.7% |
| miR5i_miR6u-16 | 28 | 47.6% | 21.2% | 10.6% |
| miR4-26 | 14 | 48.2% | 8.2% | 4.1% |
| miR4i_miR6u-16 | 27 | 48.3% | 9.6% | 4.8% |
| miR1-96 | 8 | 48.6% | 19.9% | 10.0% |
| miR5-16 | 16 | 51.4% | 12.4% | 6.2% |
| miR2i_miR6u-16 | 25 | 55.8% | 14.8% | 7.4% |
| miR6-16 | 19 | 57.4% | 19.2% | 9.6% |
| miR2i_miR5u-96 | 2 | 65.1% | 14.4% | 7.2% |
| miR5-96 | 18 | 73.5% | 22.3% | 11.1% |
| miR4i_miR5u-96 | 4 | 74.4% | 9.9% | 5.0% |
| miR2i_miR4u-96 | 1 | 85.5% | 24.2% | 12.1% |
| miR4-96 | 15 | 105.3% | 42.0% | 17.3% |

**MicroRNA plasmids that exhibited residual KCNQ4 reporter activity ranging from 21.4-38.3%.

[0566] An off-target reporter assay was also used to evaluate miRNA-mediated KCNQ4 knockdown using constructs and compositions described herein (see FIG. 16). BEK cells (seeded at 4×10⁴ cells/well) were transfected with 600 ng of human microRNA plasmid DNA or control CAG.GFP plasmid DNA, and 400 ng of Dual Luciferase off-target reporter DNA. Eleven microRNA plasmids were tested (see FIG. 16, where the number on the x-axis corresponds to the number in the “ID” column of TABLE 3). Two days post-transfection, a dual luciferase assay (Promega) was run following standard protocols, and luciferase signals were read on a standard plate reader. FIG. 16 shows Renilla luciferase signals normalized to Firefly luciferase signals, and then normalized to an CAG.EGFP control construct for eleven miR constructs (N=4). As can be seen in FIG. 16, some miR constructs give more knockdown of the off-target reporter, which suggests more likelihood of off-target effects and led to exclusion of those plasmids. Constructs that showed greater than 75% signal (less than 25% knockdown) were considered for other experiments described herein.

[0567] A passenger reporter assay was also used to assess miRNA-mediated KCNQ4 knockdown using constructs and compositions described herein (see FIG. 17). BEK cells (seeded at 4×10⁴ cells/well) were transfected with 600 ng of human microRNA plasmid DNA or control CAG.GFP plasmid DNA, and 400 ng of Dual Luciferase passenger reporter DNA. Eleven microRNA plasmids were tested (see FIG. 17, where the number on the x-axis corresponds to the number in the “ID” column of TABLE 3). Two days post-transfection, a dual luciferase assay (Promega) was run following standard protocols, and luciferase signals were read on a standard plate reader. FIG. 17 shows Renilla luciferase signals normalized to Firefly luciferase signals, and then normalized to a CAG.EGFP control construct. As shown in FIG. 17, some miRNA constructs result in more knockdown of passenger reporter, which suggests that passenger strand is more frequently generated from those microRNA constructs. Constructs that showed greater than 75% signal (less than 25% knockdown) were considered for other experiments described herein.

[0568] A codon-optimized KCNQ4 reporter assay was also used to evaluate miRNA-mediated KCNQ4 knockdown using constructs and compositions described herein (see FIG. 18). HEK cells (seeded at 4×10⁴ cells/well) were transfected with 600 ng of human microRNA plasmid DNA or control CAG.GFP plasmid DNA, and 400 ng of Dual Luciferase KCNQ4 codon-modified reporter DNA. Eleven microRNA plasmids were tested (see FIG. 18, where the number on the x-axis corresponds to the number in the “ID” column of TABLE 3). Two days post-transfection, a dual luciferase assay (Promega) was run following standard protocols, and luciferase signals were read on a standard plate reader. FIG. 18 shows Renilla luciferase signals normalized to Firefly luciferase signals, and then normalized to a CAG.EGFP control plasmid (N=4). Some miR constructs were observed to give more knockdown of the KCNQ4 codon-modified reporter. miR constructs that showed greater than 75% signal (less than 25% knockdown) were considered for other experiments described herein.

[0569] A codon-optimized KCNQ4 30-mer guide reporter assay was also used to evaluate miRNA-mediated KCNQ4 knockdown using constructs and compositions described herein (see FIG. 19). HEK cells (seeded at 4×10⁴ cells/well) were transfected with 600 ng of human microRNA plasmid DNA or control CAG.GFP plasmid DNA, and 400 ng of Dual Luciferase KCNQ4 30-mer reporter DNA. Eleven microRNA plasmids were tested (see FIG. 19, where the number on the x-axis corresponds to the number in the “ID” column of TABLE 3). Two days post-transfection, a dual luciferase assay (Promega) was run following standard protocols, and luciferase signals were read on a standard plate reader. FIG. 19 shows Renilla luciferase signals normalized to Firefly luciferase signals, and then normalized to a CAG.EGFP control plasmid (N=4). As many plasmids have two different microRNAs, each construct was tested against its specific 30-mer reporters to assess the efficacy of knockdown of each microRNA in a given plasmid. Surprisingly, some constructs show one microRNA that is more effective at knockdown than the other microRNA in that same plasmid.

[0570] A codon-optimized KCNQ4 reporter assay was also used to evaluate miRNA-mediated KCNQ4 knockdown using constructs and compositions described herein (see FIG. 20). HEK cells (seeded at 4×10⁴ cells/well) were transfected with 600 ng of mouse microRNA plasmid DNA or control CAG.GFP plasmid DNA, and 400 ng of Dual Luciferase reporter DNA. Three microRNA plasmids were tested (see FIG. 20, where the number on the x-axis corresponds to the number in the “ID” column of TABLE 3). Two days post-transfection, a dual luciferase assay (Promega) was run following standard protocols, and luciferase signals were read on a standard plate reader. FIG. 20 shows Renilla luciferase signals normalized to Firefly luciferase signals, and then normalized to an CAG.EGFP control construct (N=3). Similar knockdown levels between microRNA constructs containing GFP and containing codon-modified KCNQ4 were observed.

[0571] In vitro knockdown of KCNQ4 by miRNA constructs and compositions comprising human KCNQ4 targeting sequences was also evaluated in BEK cells (see FIGS. 21 and 22). HEK cells (seeded at 1.5×10⁵ cells/well) were transfected with 600 ng of human microRNA plasmid DNA or control CAG.GFP plasmid DNA, and 400 ng of human wild-type KCNQ4-mScarlet reporter DNA. Four microRNA constructs were tested (see FIG. 21, N=3). Three days post-transfection, cells were imaged for fluorescence (see FIG. 21, N=3) and then harvested for western blot analysis (FIG. 22, N=3). Reduced KCNQ4-mScarlet signals were observed with the different microRNA constructs compared to the CAG.GFP control construct. Without wishing to be bound to any theory, the present example suggests that miR constructs described herein resulted in microRNA-mediated knockdown of KCNQ4.

[0572] In vitro knockdown of KCNQ4 by miRNA constructs and compositions comprising mouse KCNQ4 targeting sequences were also evaluated in BEK cells (see FIGS. 23 and 24). BEK cells (seeded at 1.5×10⁵ cells/well) were transfected with 600 ng of mouse microRNA plasmid DNA or control CAG.GFP plasmid DNA, and 400 ng of mouse KCNQ4-mScarlet reporter DNA. Three microRNA constructs were tested (see FIG. 23, N=3). Three days post-transfection, cells were imaged for fluorescence (FIG. 23, N=3) and then harvested for western blot analysis (FIG. 24, N=3). Reduced KCNQ4-mScarlet signals were observed with the different microRNA constructs compared to the CAG.GFP control construct. Without wishing to be bound to any theory, the present example suggests that miR constructs described herein resulted in microRNA-mediated knockdown of KCNQ4.

[0573] AAVAnc80-mmumiR KCNQ4 knockdown constructs and compositions comprising mouse KCNQ4 targeting sequences were also evaluated using a KCNQ4 reporter assay (see FIGS. 25 and 26). HEK cells (4×10⁴ cells/well) transduced with AAVAnc80-mmumiR knockdown vectors at three MOIs (1E5 vg/cell, 4E5 vg/cell, and 1E6 vg/cell) or AAVAnc80-CAG.EGFP control vector at three MOIs (1E5 vg/cell, 4E5 vg/cell, and 1E6 vg/cell), then transfected with 400 ng of luciferase reporter plasmid. A dual luciferase assay (Promega) was performed 72 h after transduction via standard protocols. FIG. 25 shows Renilla luciferase signals normalized to Firefly luciferase signals, then normalized to AAVAnc80-CAG.EGFP vector signal. Fluorescence images of cells before dual luciferase assay are shown below their respective histograms (see FIG. 26). A dose-dependent knockdown of dual luciferase KCNQ4 reporter with increasing vector MOI across all vectors was observed.

[0574] Effects on KCNQ4 channel conductance using miRNA constructs and compositions described herein were also evaluated (see FIG. 27). CHO cells stably expressing human KCNQ4 were electroporated with different amounts of human microRNA plasmid DNA (plasmid dose was in μg of DNA). An FLIPR assay was performed by adding flupirtine (KCNQ4 agonist) at none concentrations—0.01, 0.03, 0.1, 0.3, 1, 3, 10, 30, and 100 M, N=4 wells per concentration. Fluorescence emission was measured via a thallium flux assay (potassium ion surrogate) after flupirtine addition. FIG. 27 shows maximum Relative Light Units (RLU) of different treatment conditions. A dose-dependent knockdown effect with increasing plasmid dose of the microRNA plasmids was observed, indicated by lower RLU from activated KCNQ4 in microRNA-treated cells compared to CAG.GFP treated cells.

[0575] In vitro knockdown of mouse KCNQ4 in HEK cells using mouse AAVAnc80-mmumiR-GFP constructs and compositions described herein was also evaluated (see FIG. 28). HEK cells (1.5×10⁵ cells/well) were transfected with mouse KCNQ4-mScarlet reporter plasmid (“CM” refers to an codon-optimized KCNQ4 sequence), then 24 h later transduced with mouse AAVAnc80-mmumiR-GFP vectors and harvested for Western protein analysis 72 h post-transduction. Expression of codon-modified KCNQ4 protein from the AAVAnc80-mmumiR-KCNQ4CM vectors (lanes 12 and 15) were observed. Knockdown of mouse KCNQ4 levels after treatment with AAVAnc80-mmumiR-GFP vectors was observed (e.g., comparing lane 3 (control) with lanes 6 and 9). Moreover, data provided in FIG. 28 shows that codon-modified versions of KCNQ4 are resistant to microRNA knockdown effects using two different microRNA vectors (lanes 12 and 15).

### Example 3: Generation of a Stable Human Cell Line Expressing WT KCNQ4 and a Loss-of-Function KCNQ4 Variant

[0576] The present example seeks to overcome the problem that HEK293 cells express KCNQ4 at near-undetectable levels when assayed by western blot analysis or quantitative PCR. To address this issue, the present example describes generating a stable human cell line that expresses wild-type KCNQ4 and a loss-of-function KCNQ4 variant. A stable human cell line can be produced by knocking-in (e.g., using CRISPR technology, e.g., obtaining a cell from a patient with a loss-of-function mutation, etc.) wild-type KCNQ4 and a loss-of-function KCNQ4 variant, each with a different detectable (e.g., visualizable) reporter system, such as a reporter system provided by the present disclosure. The wild-type KCNQ4 is either a native, wild-type sequence or a codon-optimized sequence (to resist miRNA-mediated degradation). The engineered human cell line is useful for a variety of purposes, such as, e.g., screening human plasmids and viruses for effective KCNQ4 knockdown, such as those described in the present disclosure. In addition, the engineered human cell line is useful for measuring K+ currents before and after treatment in accordance with the present disclosure.

### Example 4: Knockdown of KCNQ4 in Mice

[0577] The present example describes a KCNQ4 knockdown strategy to improve hearing in mice. Wild-type (+/+), heterozygous (Dn/+), and homozygous (Dn/Dn) groups of mice will each be tested in one of four conditions Theas shown in TABLE 4, and as follows: (1) administering +/+ and Dn/+ mice eGFP and miRNA constructs described herein (Group 1); (2) administering +/+ mice eGFP only (transduction), and Dn/+ and Dn/Dn mice KCNQ and miRNA constructs described herein; (3) administering Dn/+ and Dn/Dn mice KCNQ construct only (for augmented KCNQ expression); and (4) not administering any constructs to mice (negative control). Dn transgenic (hetero and homozygous) mice have been previously described (see Kharkovets et al., Mice with altered KCNQ4+ channels implicate sensory outer hair cells in human progressive deafness, EMBO, 2006; which is incorporated in its entirety herein by reference).

[0578] As one of skill in the art will appreciate, the “Kharkovets et al.,” mice are on a C57BL/6 background, which background harbors a (naturally occurring, spontaneous) point mutation in the Cdh23 gene, which results in age-related hearing loss. The present Example describes studies to be performed in both C57BL/6-based Dn transgenic mice and mice backcrossed onto another background (e.g., FVB), that does not harbor the Cdh23 mutation, such that experiments in older mice would not be confounded by any Cdh23-mediated hearing loss. The miRNA can be delivered using AAV-based constructs comprising AAV2 ITRs and viral particles can be encapsidated with a capsid comprising Anc80.

TABLE 4
KCNQ4 knockdown strategy

| Genotype | Group 1 | Group 2 | Group 3 | Group 4 |
|---|---|---|---|---|
| +/+ | eGFP + | eGFP only | | |
| | microRNA | (transduction) | | |
| Dn/+ | eGFP + | KCNQ4 + | KCNQ4 only | Uninjected |
| | microRNA | microRNA | (augment) | |
| Dn/Dn | | KCNQ4 + | KCNQ4 only | Uninjected |
| | | microRNA | (augment) | |

[0579] In this study, miRNA or control constructs are injected into mice at a particular time point. Outer hair cell (OHC) and histological analyses may be performed 2-4 weeks post injection. Auditory brainstem response (ABR) measurements may be measured beginning at two weeks post-injection and continuing at intervals of between 6-12 weeks. miRNA or control constructs are administered to weanling or juvenile (e.g., P21, P30, P36, etc.) mice or adult (P42, P60, etc.) mice. Here, mice are injected at P21 or P30. A first auditory readout is performed at approximately 3 weeks post injection, using outer hair cell (OHC) recordings and histological analyses. Auditory brainstem response measurements are performed at 12 weeks, 24 weeks, 30 weeks, and 42 weeks of age in the mice injected at P30, and at P50, P112, and P160 days of age in the mice injected at P21.

### Example 5: Replacement and Knockdown of KCNQ4 in HEK Cells

[0580] The present example describes a targeting strategy that knocks out both KCNQ4 alleles and replaces wild-type KCNQ4 with a codon-optimized KCNQ4 using a SaCas9/gRNA strategy FIG. (FIG. 9). The present example also describes an in vitro analysis of KCNQ4 knockdown in HEK cells via Western blot and quantitative PCR.

[0581] FIG. 10 shows a western blot demonstrating that transduction of SaCas9/gRNA in HEK cells significantly reduced KCNQ4. The following guides were transfected with SaCas9 and KCNQ4 DNA to determine knockdown efficiency: sg233Fw (lane 2), sg386Fw (lane 3), sg408Rev (lane 4), sg447Fw (lane 5), sg482Fw (lane 6), and sg490Fw (lane 7). An untransfected control (lane 8), sgVEGF (targeting VEGF) (lane 9), and Beta-Actin expression (lanes 2-9) were used as controls. Based on TIDE, western blot, and immunofluorescence analyses (data not shown), sgRNA 386Fw and sgRNA 408Rev inhibited KNCQ4 expression more than other sgRNAs that were tested. To expand and/or improve upon results obtained thus far, similar experiments can be performed in 3T3 cells using deadCas9 and mouse sgRNA sequences.

[0582] The present example also describes delivery of CRISPR/Cas9 using AAV (AAV-CRISPR). To begin, several constructs can be designed and characterized, in vitro, using TIDE, quantitative and western blot analyses on dual transfected cells to determine extent of DNA and RNA knockdown. The following exemplary constructs can be used: CMV.dCas9; CMV.SaCas9; Hsa KCNQ4codop.U6-386Fw (n=3 in HEK); Hsa KCNQ4codop.U6-408Rev (n=3 in HEK); Mmu KCNQ4codop.U6-386Fw (n=1, then explant); Mmu KCNQ4codop.U6-408Rev (n=1, then explant); Hsa eGFP.U6-386Fw (n=3 in HEK); Hsa eGFP.U6-408Rev (n=3 in HEK); Mmu eGFP.U6-386Fw (n=1, then explant); Mmu eGFP.U6-408Rev (n=1, then explant). Separately, a dCas9.U6 gRNA (human) is designed and characterized, and analyzed using the same methods.

[0583] An Anc80-based construct can be used for sgRNA constructs. The AAV-CRISPR construct efficiency is tested in wild-type mouse cochlear explants, human cells, or HEK cells using an eGFP virus to determine knockdown of endogenous KCNQ4 without replacement. Knockdown of KCNQ4 is evaluated using various assays such as, e.g., IHC, quantitative, and/or western blot analyses. AAV2 capsids can also be tested.

[0584] The present example also describes mouse AAV-CRISPR experiments (N=24). At 21 and 30 days post-delivery of AAV-CRISPR, mice are sacrificed and analyses (e.g., IHC analyses) for deadCas9, Myo7a (in both inner and outer hair cells) and KCNQ4 can be performed

### Example 6: Treatment of KCNQ4-Mediated Hearing Loss

[0585] The present example describes a targeting strategy that knocks out both KCNQ4 alleles to eliminate any KCNQ4 variants and simultaneously or sequentially administers a composition encoding a codon-optimized KCNQ4. This knockdown is achieved using an miRNA or SaCas9/gRNA strategy. The present example also uses, either as a pre-treatment or quality control assay, an in vitro assay of KCNQ4 knockdown in HEK cells via Western blot and quantitative PCR to determine efficacy of approach.

[0586] The compositions are administered to a subject with at least one identified loss-of-function KCNQ4 variant gene. The genomic KCNQ4 genes in the subject are suppressed and expression of the administered, codon-optimized wild type KCNQ4 is achieved. Prior to and post-administration, hearing tests may be performed (e.g., ABRs, DPOAEs).

[0587] An Anc80-based or AAV2-based particle can be used to deliver all constructs (e.g., miRNA, CRISPR/Cas9, exogenous codon-optimized KCNQ4).

### Example 7: Device Description for Suitable Delivery of Compositions to the Inner Ear

[0588] This example relates to a device suitable for the delivery of rAAV particles to the inner ear. A composition comprising rAAV particles is delivered to the cochlea of a subject using a specialized microcatheter designed for consistent and safe penetration of the round window membrane (RWM). The microcatheter is shaped such that the surgeon performing the delivery procedure can enter the middle ear cavity via the external auditory canal and contact the end of the microcatheter with the RWM. The distal end of the microcatheter may include at least one microneedle with a diameter from about 10 microns to about 1,000 microns, which produces perforations in the RWM that are sufficient to allow rAAV particles as described (e.g., comprising an rAAV construct of the present disclosure) to enter the cochlear perilymph of the scala tympani at a rate which does not damage the inner ear (e.g., a physiologically acceptable rate, e.g., a rate of approximately 30 μL/min to approximately 90 μL/min), but small enough to heal without surgical repair. The remaining portion of the microcatheter, proximal to the microneedle(s), is loaded with the AAV particles/artificial perilymph formulation at a defined titer (e.g., approximately 1×10¹² to 5×10¹³ vg/mL).) The proximal end of the microcatheter is connected to a micromanipulator that allows for precise, low volume infusions of approximately 30 μL to approximately 100 μL.

### Example 8: Human Clinical Example

[0589] A patient is diagnosed as having a loss-of-function KCNQ4 gene variant. Inhibitory nucleic acids are designed to target the loss-of-function KCNQ4 gene variant. The patient is put under general anesthesia. The surgeon approaches the tympanic membrane from external auditory canal, makes a small incision at the inferior edge of the external auditory canal where it meets the tympani membrane, and lifts the tympanic membrane as a flap to expose the middle ear space. A surgical laser is used to make a small opening (approximately 2 mm) in the stapes footplate. The surgeon then penetrates the round window membrane with a microcatheter loaded with a solution of a mixture of AAV-based constructs each comprising inhibitory nucleic acids to KCNQ4 or exogenous, codon-optimized KCNQ4, prepared in artificial perilymph at a titer of 1e13 vg/mL. The microcatheter is connected to a micromanipulator that infuses approximately 20 μL of the mixture at a rate of approximately 1 uL/min. At the conclusion of the infusion, the surgeon withdraws the microcatheter and patches the holes in the stapes foot plate and RWM with a gel foam patch. The procedure concludes with replacement of the tympanic membrane flap before the patient is allowed to withdraw and recover from the anesthesia.

### Example 9: Non-Invasive Prenatal Testing of Maternal Blood to Detect a KCNQ4 Mutation

[0590] Maternal blood samples (20-40 mL) are collected into Cell-free DNA tubes. At least 7 mL of plasma is isolated from each sample via a double centrifugation protocol of 2,000 g for 20 minutes, followed by 3,220 g for 30 minutes, with supernatant transfer following the first spin. cfDNA is isolated from 7-20 mL plasma using a QIAGEN QIAmp Circulating Nuclei Acid kit and eluted in 45 μL TE buffer. Pure maternal genomic DNA is isolated from the buffy coat obtained following the first centrifugation.

[0591] By combining thermodynamic modeling of the assays to select probes with minimized likelihood of probe-probe interaction with amplification approaches described previously (Stiller et al. 2009 Genome Res 19(10):1843-1848, which is incorporated herein in its entirety), multiplexing of 11,000 assays can be achieved. Maternal cfDNA and maternal genomic DNA samples are pre-amplified for 15 cycles using 11,000 target-specific assays and an aliquot is transferred to a second PCR reaction of 15 cycles using nested primers. Samples are prepared for sequencing by adding barcoded tags in a third 12-cycle round of PCR. The targets include SNPs corresponding to the greater than 30 mutations in KCNQ4 known to lead to KCNQ4 loss-of-function and/or sequences that cover all exons of KCNQ4, in order to detect any presently unknown but potentially pathogenic (e.g., loss-of-function) variant. The amplicons are then sequenced using an Illumina HiSeq sequencer. Genome sequence alignment is performed using commercially available software.

### Example 10: Human and Mouse KCNQ4 Expression Following Construct Administration

[0592] This example demonstrates that human KCNQ4 can be expressed from a construct as described herein when administered to the cochlea of a mouse. Further, this example demonstrates that an miR sequence can be expressed from a construct as described herein when administered to the cochlea of a mouse and decrease the level of mouse KCNQ4 expression.

[0593] At postnatal day 3, mice were divided into four treatment groups, as shown in FIG. 36A. Treatment Group 1 included KCNQ4 heterozygous mice (“KI”) and was administered a low dose of the pITR.CAG.mmu.miR2i_miR6u-26_KCNQ4codop construct (SEQ ID NO: 24). Treatment Group 2 included KCNQ4 heterozygous mice and was administered a medium dose of the pITR.CAG.mmu.miR2i_miR6u-26_KCNQ4codop construct (SEQ ID NO: 24). Treatment Group 3 included KCNQ4 heterozygous mice and was administered vehicle; and treatment Group 4 had a wild-type genotype and was administered vehicle.

[0594] Thirty (30) days post-surgery, cochlea were harvested from the mice in the four treatment groups for RT-qPCR analysis. The relative expression level of mouse KCNQ4 mRNA measured in the cochlea for each treatment group is shown in FIG. 36B. As shown, the relative quantities of mouse KCNQ4 was slightly reduced upon miR treatment (Treatment Group 1=light solid line; Treatment Group 2=long dashed line; Treatment Group 3=solid dark line; Treatment Group 4=short dashed line). This data indicates that the miR was able to slightly reduce mouse KCNQ4 mRNA. Without wishing to be bound by any particular theory, it has been hypothesized that challenges associated with removing non-relevant (e.g., non-cochlear) cells completely from the samples assayed may have contributed to the variability detected across samples with in the same treatment.

[0595] The relative expression level of human codon-modified KCNQ4 mRNA measured in the cochlea of the mice in Treatment Groups 1-3 is shown in FIG. 36C. As shown, the relative quantities of human codon-modified KCNQ4 was increased upon treatment (Treatment Group 1=light solid line; Treatment Group 2=long dashed line; Treatment Group 3=solid dark line). This data indicates that the human KCNQ4 knock-in was expressed and was not significantly reduced by the miR treatment.

### Example 11: Construct Mediated Mouse KCNQ4 Knockdown (miR) with Human KCNQ4 Gene Transfer Preserved Outer Hair Cell Survival and Function

[0596] This example demonstrates that AAVAnc80 mediated knockdown of mouse KCNQ4 (via miR) and gene transfer of human KCNQ4 preserved outer hair cell survival and function.

[0597] At postnatal day 3, mice were divided into five treatment groups, as shown in FIG. 37A. Treatment group 1 (gray) included KCNQ4 heterozygous mice and was administered vehicle. Treatment Group 2 (purple) included KCNQ4 heterozygous mice and was administered 3.0E9 vg/cochlea of the pITR.CAG.mmu.miR2i_miR6u-26_KCNQ4codop construct (SEQ ID NO: 24). Treatment Group 3 (red) included KCNQ4 heterozygous mice and was administered 7.0E9 vg/cochlea of the pITR.CAG.mmu.miR2i_miR6u-26_KCNQ4codop construct (SEQ ID NO: 24). Treatment Group 4 (green) included KCNQ4 heterozygous mice and was administered 9.4E9 vg/cochlea of the pITR.CAG.mmu.miR2i_miR6u-26_KCNQ4codop construct (SEQ ID NO: 24). Treatment Group 5 (black) had a wild-type genotype and was administered vehicle. The mice were administered the pITR.CAG.mmu.miR2i_miR6u-26_KCNQ4codop construct or vehicle by intracochlear injection.

[0598] Cochlear physiology experiments (Distortion-Product Otoacoustic Emissions; DPOAE) were performed at post-surgery day 30 and post-surgery day 45. Cochlea were harvested for whole-mount cochlear histology at post-surgery day 45.

[0599] As shown in FIG. 37A, increasing the dose used in the treatment resulted in reduced (improved) DPOAE thresholds. As shown in FIG. 37B, increasing the dose used in the treatment resulted in increased survival of outer hair cells, as visualized by cochlear histology. In particular, an increase in the number of red and blue (colors depicted in grey scale) hair cells were observed with increasing doses of vector.

### Example 12: Construct Mediated Mouse KCNQ4 Knockdown (CRISPR) with Human KCNQ4 Gene Transfer Preserved Outer Hair Cell Survival and Function

[0600] This example demonstrates that AAVAnc80 mediated knockdown of mouse KCNQ4 (via miR) and gene transfer of human KCNQ4 preserved outer hair cell survival and function. This example also demonstrates that AAVAnc80 mediated knockdown of mouse KCNQ4 (via CRISPR) and gene transfer of human KCNQ4 preserved outer hair cell survival and function.

[0601] At postnatal day 3, KCNQ4 wild-type mice and heterozygous mice were divided into seven treatment groups. Data was collected at 30 days post administration from Treatment Groups 1-6. Data was collected at 45 days post administration from Treatment Group 7.

[0602] FIG. 38A shows a graph depicting distortion product otoacoustic emissions (DPOAE) thresholds (dB SPL) measured at 8 kHz (left), 11.3 kHz (middle), and 16 kHz (right) for Treatment Groups 1-6. Treatment Group 1 (solid dark line, circle with diagonal lines) included KCNQ4 heterozygous mice and was administered vehicle. Treatment Group 2 (thin solid line) included KCNQ4 heterozygous mice and was administered 3.0E9 vg/cochlea of the pITR.CAG.mmu.miR2i_miR6u-26_KCNQ4codop construct (SEQ ID NO: 24). Treatment Group 3 (long dashed line) included KCNQ4 heterozygous mice and was administered 7.0E9 vg/cochlea of the pITR.CAG.mmu.miR2i_miR6u-26_KCNQ4codop construct (SEQ ID NO: 24). Treatment Group 4 (light dashed line) included KCNQ4 heterozygous mice and was administered 9.4E9 vg/cochlea of the pITR.CAG.mmu.miR2i_miR6u-26_KCNQ4codop construct (SEQ ID NO: 24). Treatment Group 5 (solid dark line, open square) included KCNQ4 heterozygous mice and was co-administered 5.5E9 vg/cochlea of the pITR-CAG.hKCNQ4codop.U6-hsammu386Fw construct (SEQ ID NO: 274) and the pITR.CMVEnhProm.SaCas9 (SEQ ID NO: 278). In some embodiments, KCNQ4 heterozygous mice may be co-administered 1.3E10 vg/cochlea of the pITR-CAG.hKCNQ4codop.U6-hsammu386Fw construct (SEQ ID NO: 274) and the pITR.CMVEnhProm.SaCas9 (SEQ ID NO: 278). Treatment Group 6 (dashed line) had a wild-type genotype and was administered vehicle. FIG. 38B includes a table with shows a table depicting the number of animals for each Treatment Group (6 per group) at a 30-day survival duration. The mice were administered a construct or vehicle by intracochlear injection.

[0603] FIG. 40 shows a graph depicting distortion product otoacoustic emissions (DPOAE) thresholds (dB SPL) measured at 8 kHz (left) and 16 kHz (right) for Treatment Group 6 (dark line, circle with diagonal line), Treatment Group 1 (light line, circle with diagonal line), and Treatment Group 4 (dashed line, circle with crosses). FIG. 40 also shows DPOAE threshold data collected from a Treatment Group 7 (dashed line, open square), which included KCNQ4 heterozygous mice that were administered 1.3E10 vg/cochlea of the pITR-CAG.hKCNQ4codop.U6-hsammu386Fw construct (SEQ ID NO: 274) and the pITR.CMVEnhProm.SaCas9 (SEQ ID NO: 278). FIG. 40 shows that AAVAnc80-mediated delivery of KCNQ4 along with miR-mediated knock down (Treatment Group 4) or CRISPR-mediated gene editing (Treatment Group 7) reduced DPOAE thresholds, thereby resulting in improved cochlear function for Treatment Group 4 and for Treatment Group 7.

[0604] FIG. 41 shows a graph depicting percent (%) survival of outer hair cells measured at 8 kHz (left) and 16 kHz (right) for Treatment Group 6 (solid line), Treatment Group 1 (light line), Treatment Group 4 (long dashed line) and Treatment Group 5 (short dashed line). FIG. 41 shows that AAVAnc80-mediated delivery of KCNQ4 along with miR-mediated knock down (Treatment Group 4) or CRISPR-mediated gene editing (Treatment Group 5) increased outer hair cell survival in Treatment Group 4 and Treatment Group 5.

[0605] Taken together, the present example demonstrates AAVAnc80-mediated delivery of KCNQ4 along with miR-mediated knock down or CRISPR-mediated gene editing resulted in improvement of cochlear function and an increase in outer hair cell survival.

### Example 13: Codon-Modification of Add-Back KCNQ4 Gene Resists CRISPR-Mediated Knockdown

[0606] This example demonstrates that endogenous KCNQ4 may be replaced by a KCNQ4 gene that includes a sequence that differs from the endogenous KCQN4 gene sequence (e.g., a codon-modified version of KCNQ4 that has been engineered to resist CRISPR-mediated degradation).

[0607] In vitro knockdown of mouse KCNQ4 in HEK cells using constructs and compositions described herein was evaluated (see FIG. 39). Eight conditions were tested and the samples run in each lane were transfected with the following:
[0608] LANES 1 and 3: CRISPR and mKCNQ4-CM plasmids (“CM” refers to an codon-optimized KCNQ4 sequence); different gRNAs were used for lanes 1 and 3.
[0609] LANES 2 and 4: mKCNQ4-CM plasmid only.
[0610] LANES 5 and 8: mKCNQ4-mScarlet plasmid only.
[0611] LANES 6 and 7: CRISPR and mKCNQ4-mScarlet reporter plasmids; different gRNAs were used for lanes 6 and 7.

[0612] HEK cells (1.5×10⁵ cells/well) were transfected with plasmids as described above in this Example. Cells were transfected with mKCNQ4-CM (lanes 1-4) or mKCNQ4-mScarlet (lanes 5-8) plasmids, then four hours later were transfected with CRISPR (lanes 1, 3, 6, 7) plasmids. Cells were harvested for Western protein analysis 72 h post-transfection.

[0613] As shown in lanes 1-4, expression of codon-modified KCNQ4 protein was observed. Knockdown of mouse KCNQ4 levels after treatment with CRISPR plasmids was observed (e.g., comparing lane 5 (control) with lanes 6 and 7). Moreover, data provided in FIG. 39 shows that codon-modified versions of KCNQ4 are resistant to CRISPR knockdown effects using two different gRNA plasmids described herein (lanes 1 and 3).

### EMBODIMENTS

[0614] Embodiment 1. A construct comprising a coding sequence operably linked to a promoter, wherein the coding sequence encodes a Kv7.4 protein.

[0615] Embodiment 2. The construct of embodiment 1, wherein the coding sequence is a KCNQ4 gene.

[0616] Embodiment 3. The construct of embodiment 2, wherein the KCNQ4 gene is a primate KCNQ4 gene.

[0617] Embodiment 4. The construct of embodiment 2 or 3, wherein the KCNQ4 gene is a human KCNQ4 gene.

[0618] Embodiment 5. The construct of embodiment 4, wherein the human KCNQ4 gene comprises a nucleic acid sequence according to SEQ ID NO: 1, SEQ ID NO: 2, SEQ ID NO: 3, SEQ ID NO: 4, SEQ ID NO: 5, SEQ ID NO: 6, SEQ ID NO: 7, SEQ ID NO: 8, SEQ ID NO: 9, SEQ ID NO: 10, SEQ ID NO: 25, SEQ ID NO: 26, SEQ ID NO: 27, SEQ ID NO: 28, SEQ ID NO: 29, SEQ ID NO: 30 or SEQ ID NO: 90.

[0619] Embodiment 6. The construct of embodiment 4 or 5, wherein the human KCNQ4 gene comprises a nucleic acid sequence according to SEQ ID NO: 9 or 10.

[0620] Embodiment 7. The construct of embodiment 1, wherein the Kv7.4 protein is a primate Kv7.4 protein.

[0621] Embodiment 8. The construct of embodiment 1 or 7, wherein the Kv7.4 protein is a human Kv7.4 protein.

[0622] Embodiment 9. The construct of embodiment 8, wherein the Kv7.4 protein comprises an amino acid sequence according to SEQ ID NO: 11, SEQ ID NO: 12, or SEQ ID NO: 13.

[0623] Embodiment 10. The construct of any one of embodiments 1-9, wherein the promoter is an inducible promoter, a constitutive promoter, or a tissue-specific promoter.

[0624] Embodiment 11. The construct of any one of embodiments 1-10, wherein the promotor is a cochlear hair cell-specific promoter.

[0625] Embodiment 12. The construct of embodiment 11, wherein the cochlear hair cell-specific promoter is a ATOH1 promoter, a POU4F3 promoter, a LHX3 promoter, a MYO7A promoter, a MYO6 promoter, a α9ACHR promoter, or a αl0ACHR promoter.

[0626] Embodiment 13. The construct of any one of embodiments 1-10, wherein the promoter is a CAG promoter, a CBA promoter, an smCBA promoter, a CMV promoter, or a CB7 promoter.

[0627] Embodiment 14. The construct of embodiment 13, wherein the promoter comprises a nucleic acid sequence according to SEQ ID NO: 22, SEQ ID NO: 23, SEQ ID NO: 24, SEQ ID NO: 297, SEQ ID NO: 298, SEQ ID NO: 299, SEQ ID NO: 300, SEQ ID NO: 301, SEQ ID NO: 302, SEQ ID NO: 303, SEQ ID NO: 304, SEQ ID NO: 305, SEQ ID NO: 306, SEQ ID NO: 307, SEQ ID NO: 308, SEQ ID NO: 309, and/or SEQ ID NO: 310.

[0628] Embodiment 15. The construct of any one of embodiments 1-10, wherein the promoter is a CHRNA10 promoter, a DNM3 promoter, a MUC15 promoter, a PLBD1 promoter, a RORB promoter, a STRIP2 promoter, a AQP11 promoter, a KCNQ4 promoter, a LBH promoter, a STRC promoter, a TUBA8 promoter, an OCM promoter, a truncated (or “short”) OCM promoter, a Prestin promoter, or a truncated (or “short”) Prestin promoter.

[0629] Embodiment 16. The construct of embodiment 15, wherein the promoter comprises a nucleic acid sequence according to SEQ ID NO: 316, SEQ ID NO: 317, SEQ ID NO: 318, SEQ ID NO: 319, SEQ ID NO: 320, SEQ ID NO: 321, SEQ ID NO: 322, SEQ ID NO: 323, SEQ ID NO: 324, SEQ ID NO: 325, SEQ ID NO: 326, SEQ ID NO: 327, SEQ ID NO: 328, and/or SEQ ID NO: 329.

[0630] Embodiment 17. The construct of any one of embodiments 1-16, further comprising two AAV inverted terminal repeats (ITRs), wherein the two AAV ITRs flank the coding sequence and promoter.

[0631] Embodiment 18. The construct of embodiment 17, wherein the two AAV ITRs are or are derived from AAV2 ITRs.

[0632] Embodiment 19. The construct of embodiment 16, wherein the two AAV ITRs comprise: (i) a 5′ ITR comprising a nucleic acid sequence according to SEQ ID NO: 15 and a 3′ ITR comprising a nucleic acid sequence according to SEQ ID NO: 16; or (ii) a 5′ ITR comprising a nucleic acid sequence according to SEQ ID NO: 19 and a 3′ ITR comprising a nucleic acid sequence according to SEQ ID NO: 20.

[0633] Embodiment 20. The construct of embodiment 1, wherein the construct comprises a nucleic acid sequence according to SEQ ID NO: 1, SEQ ID NO: 2, SEQ ID NO: 3, SEQ ID NO: 4, SEQ ID NO: 5, SEQ ID NO: 6, SEQ ID NO: 7, SEQ ID NO: 8, SEQ ID NO: 9, SEQ ID NO: 10, SEQ ID NO: 25, SEQ ID NO: 26, SEQ ID NO: 27, SEQ ID NO: 28, SEQ ID NO: 29, SEQ ID NO: 30, SEQ ID NO: 90, or SEQ ID NO: 91.

[0634] Embodiment 21. The construct of embodiment 1, wherein the construct comprises a nucleic acid sequence according to one or more of SEQ ID NOs: 1-41 and/or 42-70 and/or 96-97.

[0635] Embodiment 22. A construct comprising a coding sequence operably linked to a promoter, wherein the coding sequence encodes a KCNQ4 inhibitory nucleic acid, which comprises a nucleotide sequence complementary to a KCNQ4 gene.

[0636] Embodiment 23. The construct of embodiment 22, wherein the KCNQ4 inhibitory nucleic acid is an miRNA, an siRNA, or shRNA.

[0637] Embodiment 24. The construct of embodiment 22 or 23, wherein the KCNQ4 inhibitory RNA comprises a sequence according to SEQ ID NO: 42, SEQ ID NO: 43, SEQ ID NO: 44, SEQ ID NO: 45, SEQ ID NO: 46, SEQ ID NO: 47, SEQ ID NO: 48, SEQ ID NO: 49, SEQ ID NO: 50, SEQ ID NO: 51, SEQ ID NO: 52, SEQ ID NO: 53, SEQ ID NO: 54, SEQ ID NO: 55, SEQ ID NO: 56, SEQ ID NO: 57, SEQ ID NO: 58, SEQ ID NO: 59, SEQ ID NO: 60, SEQ ID NO: 61, SEQ ID NO: 62, SEQ ID NO:63, SEQ ID NO: 64, SEQ ID NO: 65, SEQ ID NO: 66, SEQ ID NO: 67, SEQ ID NO: 68, SEQ ID NO: 69, SEQ ID NO: 70, SEQ ID NO: 96, or SEQ ID NO: 97.

[0638] Embodiment 25. The construct of embodiment 22, wherein the KCNQ4 inhibitory RNA is a gRNA.

[0639] Embodiment 26. The construct of embodiment 22 or 25, wherein the KCNQ4 inhibitory RNA comprises a sequence according to SEQ ID NO: 42, SEQ ID NO: 43, SEQ ID NO: 44, SEQ ID NO: 45, SEQ ID NO: 46, SEQ ID NO: 47, SEQ ID NO: 48.

[0640] Embodiment 27. The construct of embodiment 22, wherein the KCNQ4 gene is a primate KCNQ4 gene.

[0641] Embodiment 28. The construct of embodiment 22 or 27, wherein the KCNQ4 gene is a human KCNQ4 gene.

[0642] Embodiment 29. The construct of embodiment 28, wherein the human KCNQ4 gene comprises a nucleic acid sequence according to SEQ ID NO: 1, SEQ ID NO: 2, SEQ ID NO: 3, SEQ ID NO: 4, SEQ ID NO: 5, SEQ ID NO: 6, SEQ ID NO: 7, SEQ ID NO: 8, SEQ ID NO: 9, SEQ ID NO: 10, SEQ ID NO: 25, SEQ ID NO: 26, SEQ ID NO: 27, SEQ ID NO: 28, SEQ ID NO: 29, SEQ ID NO: 30 or SEQ ID NO: 90.

[0643] Embodiment 30. The construct of any one of embodiments 22-29, wherein the promoter is an inducible promoter, a constitutive promoter, or a tissue-specific promoter.

[0644] Embodiment 31. The construct of any one of embodiments 22-30, wherein the promotor is a cochlear hair cell-specific promoter.

[0645] Embodiment 32. The construct of embodiment 31, wherein the cochlear hair cell-specific promoter is a ATOH1 promoter, a POU4F3 promoter, a LHX3 promoter, a MYO7A promoter, a MYO6 promoter, a α9ACHR promoter, or a αl0ACHR promoter.

[0646] Embodiment 33. The construct of any one of embodiments 22-30, wherein the promoter is an H1 or U6 promoter.

[0647] Embodiment 34. The construct of embodiment 33, wherein the promoter comprises a nucleic acid sequence according to SEQ ID NO: 22, SEQ ID NO: 23, SEQ ID NO: 24, SEQ ID NO: 297, SEQ ID NO: 298, SEQ ID NO: 299, SEQ ID NO: 300, SEQ ID NO: 301, SEQ ID NO: 302, SEQ ID NO: 303, SEQ ID NO: 304, SEQ ID NO: 305, SEQ ID NO: 306, SEQ ID NO: 307, SEQ ID NO: 308, SEQ ID NO: 309, and/or SEQ ID NO: 310.

[0648] Embodiment 35. The construct of any one of embodiments 22-34, further comprising two AAV inverted terminal repeats (ITRs), wherein the two AAV ITRs flank the coding sequence and promoter.

[0649] Embodiment 36. The construct of embodiment 35, wherein the two AAV ITRs are or are derived from AAV2 ITRs.

[0650] Embodiment 37. The construct of embodiment 35, wherein the two AAV ITRs comprise: (i) a 5′ ITR comprising a nucleic acid sequence according to SEQ ID NO: 15 and a 3′ ITR comprising a nucleic acid sequence according to SEQ ID NO: 16; or (ii) a 5′ ITR comprising a nucleic acid sequence according to SEQ ID NO: 19 and a 3′ ITR comprising a nucleic acid sequence according to SEQ ID NO: 20.

[0651] Embodiment 38. The construct of embodiment 1, wherein the construct comprises a nucleic acid sequence according to any of SEQ ID NOs: 1-10.

[0652] Embodiment 39. The construct of embodiment 1, wherein the construct comprises a nucleic acid sequence according to any of SEQ ID NOs: 25-30 or 90-91.

[0653] Embodiment 40. A construct comprising a sequence according to SEQ ID NO: 332, SEQ ID NO: 333, SEQ ID NO: 334, SEQ ID NO: 335, SEQ ID NO: 336, SEQ ID NO: 337, SEQ ID NO: 338, SEQ ID NO: 339, SEQ ID NO: 340, SEQ ID NO: 341, SEQ ID NO: 342, SEQ ID NO: 343, SEQ ID NO: 344, SEQ ID NO: 345, SEQ ID NO: 346, SEQ ID NO: 347, SEQ ID NO: 348, SEQ ID NO: 349, SEQ ID NO: 350, SEQ ID NO: 351, SEQ ID NO: 352, SEQ ID NO: 353, SEQ ID NO: 354, or SEQ ID NO: 355.

[0654] Embodiment 41. A construct comprising a sequence according to SEQ ID NO: 334, SEQ ID NO: 335, SEQ ID NO: 337, SEQ ID NO: 339, SEQ ID NO: 345, SEQ ID NO: 346, SEQ ID NO: 347, SEQ ID NO: 348, SEQ ID NO: 349, SEQ ID NO: 350, SEQ ID NO: 351, SEQ ID NO: 352, SEQ ID NO: 353, SEQ ID NO: 354, or SEQ ID NO: 355, without a FLAG sequence.

[0655] Embodiment 42. An AAV particle comprising the construct of any one of embodiments 1-21.

[0656] Embodiment 43. An AAV particle comprising the construct of any one of embodiments 22-41.

[0657] Embodiment 44. The AAV particle of embodiment 42 or 43, further comprising an AAV capsid, wherein the AAV capsid is or is derived from an AAV2, AAV3, AAV4, AAV5, AAV6, AAV7, AAV8, AAV9, AAV10, AAV-rh8, AAV-rh10, AAV-rh39, AAV-rh43 or AAV Anc80 capsid.

[0658] Embodiment 45. The AAV particle of embodiment 44, wherein the AAV capsid is an AAV Anc80 capsid.

[0659] Embodiment 46. A composition comprising: (i) the construct of any one of embodiments 1-21; (ii) the construct of any one of embodiments 22-41; or (iii) a combination thereof.

[0660] Embodiment 47. A composition comprising the AAV particle of any one of embodiments 42-45.

[0661] Embodiment 48. A composition comprising: (i) the AAV particle of embodiment 42; (ii) the AAV particle of embodiment 43; or (iii) a combination thereof.

[0662] Embodiment 49. The composition of embodiment 48, wherein the AAV particle of (i), (ii), or both further comprise an AAV capsid, wherein the AAV capsid is or is derived from an AAV2, AAV3, AAV4, AAV5, AAV6, AAV7, AAV8, AAV9, AAV10, AAV-rh8, AAV-rh10, AAV-rh39, AAV-rh43 or AAV Anc80 capsid.

[0663] Embodiment 50. The composition of embodiment 48, wherein the AAV capsid of the AAV particle of (i), (ii), or both is an AAV Anc80 capsid.

[0664] Embodiment 51. The composition of any one of embodiments 46-50, wherein the composition is a pharmaceutical composition.

[0665] Embodiment 52. The composition of embodiment 51, further comprising a pharmaceutically acceptable carrier.

[0666] Embodiment 53. A cell comprising the composition of any one of embodiments 46-52.

[0667] Embodiment 54. The cell of embodiment 53, wherein the cell is in vivo, ex vivo, or in vitro.

[0668] Embodiment 55. The cell of embodiment 53 or 54, wherein the cell is a mammalian cell.

[0669] Embodiment 56. The cell of embodiment 55, wherein the mammalian cell is a human cell.

[0670] Embodiment 57. The cell of embodiment 56, wherein the cell is immortalized to generate a stable cell line.

[0671] Embodiment 58. The cell of embodiment 56, wherein the human cell is in the ear of a subject.

[0672] Embodiment 59. The cell of embodiment 56, wherein at least one copy of an endogenous KCNQ4 gene has at least one sequence variation.

[0673] Embodiment 60. The cell of embodiment 59, wherein the at least one sequence variation results in a loss-of-function gene product.

[0674] Embodiment 61. A system comprising the composition of any one of embodiments 46-52.

[0675] Embodiment 62. A method comprising contacting an inner ear cell with the composition of any one of embodiments 46-52.

[0676] Embodiment 63. The method of embodiment 62, where the inner ear cell is an outer hair cell.

[0677] Embodiment 64. The method of embodiment 62 or 63, wherein the inner ear cell is in the ear of a subject.

[0678] Embodiment 65. The method of embodiment 62 or 63, wherein the inner ear cell is in vitro or ex vivo.

[0679] Embodiment 66. The method of any one of embodiments 62-65, wherein the cell has been contacted with a construct of any one of embodiments 20-37.2, and wherein the endogenous KCNQ4 gene product demonstrates reduced expression as compared to expression of an endogenous KCNQ4 gene product in a comparable cell that has not been contacted with a construct of any one of embodiments 22-41.

[0680] Embodiment 67. The method of embodiment 66, wherein the cell has been contacted with the construct of any one of embodiments 1-21.

[0681] Embodiment 68. The method of embodiment 67, wherein the construct of any one of embodiments 1-19 comprises a nucleic acid sequence that is different than the endogenous human KCNQ4 gene.

[0682] Embodiment 69. The method of embodiment 68, wherein the construct of any one of embodiments 1-21 encodes a codon modified human KCNQ4 nucleic acid sequence.

[0683] Embodiment 70. The method of embodiment 68 or 69, wherein the construct is the construct of embodiment 6.

[0684] Embodiment 71. The method of any one of embodiments 67-70, wherein the exogenous KCNQ4 gene product is expressed at a level that is at least 25% (e.g., at least 30%, e.g., at least 35%, e.g., at least 40%, e.g., at least 45%, e.g., at least 50%, e.g., at least 75%, e.g., at least 100%, e.g., at least 125%) of the expression of endogenous KCNQ4 gene product.

[0685] Embodiment 72. A method comprising, contacting a cell with: (i) the construct of any one of embodiments 1-41; and (ii) one or more plasmids comprising an AAV Rep gene, AAV Cap gene, AAV VA gene, AAV E2a gene, and AAV E4 gene.

[0686] Embodiment 73. The method of embodiment 72, where the cell is an inner ear cell.

[0687] Embodiment 74. The method of embodiment 73, wherein the inner ear cell is outer hair cell.

[0688] Embodiment 75. The method of embodiment 73, wherein the inner ear cell is in the ear of a subject.

[0689] Embodiment 76. The method of embodiment 62 or 63, wherein the inner ear cell is in vitro or ex vivo.

[0690] Embodiment 77. A method comprising introducing the composition of any one of embodiments 46-52 into the inner ear of a subject.

[0691] Embodiment 78. The method of embodiment 77, wherein the composition is introduced into the cochlea of the subject.

[0692] Embodiment 79. The method of embodiment 77 or 78, wherein the composition is introduced via a round window membrane injection.

[0693] Embodiment 80. The method of any one of embodiments 60, 65, or 67-69, further comprising measuring a hearing level of the subject.

[0694] Embodiment 81. The method of embodiment 80, a hearing level is measured by performing an auditory brainstem response (ABR) test.

[0695] Embodiment 82. The method of embodiment 80 or 81, further comprising comparing the hearing level of the subject to a reference hearing level.

[0696] Embodiment 83. The method of embodiment 82, wherein the reference hearing level is a published or historical reference hearing level.

[0697] Embodiment 84. The method of embodiment 83, wherein the hearing level of the subject is measured after the construct of any one of embodiments 1-19 is introduced, and the reference hearing level is a hearing level of the subject that was measured before the construct of any one of embodiments 1-21 was introduced.

[0698] Embodiment 85. The method of any one of embodiments 62-84, further comprising measuring a level of a KCNQ4 gene product in a subject.

[0699] Embodiment 86. The method of embodiment 85, wherein the level of the KCNQ4 gene product is measured in the inner ear of the subject.

[0700] Embodiment 87. The method of embodiment 85, wherein the level of the KCNQ4 gene product is measured in the cochlea of the subject.

[0701] Embodiment 88. The method of any one of embodiments 62-87, further comprising comparing the level of a KCNQ4 gene product in the subject to a reference KCNQ4 gene product level.

[0702] Embodiment 89. The method of embodiment 88, wherein the reference hearing level is a published or historical reference KCNQ4 gene product level.

[0703] Embodiment 90. The method of embodiment 85, wherein the level of a KCNQ4 gene product in the subject is measured after the construct of any one of embodiments 1-41 is introduced, and the reference KCNQ4 gene product level is a KCNQ4 gene product level of the subject that was measured before the composition of any one of embodiments 1-41 was introduced.

[0704] Embodiment 91. A method of treating hearing loss comprising administering the composition of any one of embodiments 46-52 to a subject in need thereof.

[0705] Embodiment 92. A method of treating hearing loss comprising administering a particle of any one of embodiments 42-45 to a subject in need thereof.

[0706] Embodiment 93. The method of embodiment 91 or 92, wherein the hearing loss is DFNA2.

[0707] Embodiment 94. A construct of any one of embodiments 1-41 for use in the treatment of hearing loss.

[0708] Embodiment 95. The construct of embodiment 94, wherein the hearing loss is DFNA2.

[0709] Embodiment 96. A composition of any one of embodiments 46-52 for use in the treatment of hearing loss.

[0710] Embodiment 97. The composition of embodiment 96, wherein the hearing loss is DFNA2.

[0711] Embodiment 98. A particle of any one of embodiments 42-45 for use in the treatment of hearing loss.

[0712] Embodiment 99. The particle of embodiment 98, wherein the hearing loss is DFNA2.

[0713] Embodiment 100. Use of a construct of any one of embodiments 1-41 for the manufacture of a medicament to treat hearing loss.

[0714] Embodiment 101. Use of a composition of any one of embodiments 46-52 for the manufacture of a medicament to treat hearing loss.

[0715] Embodiment 102. Use of a particle of any one of embodiments 42-45 for the manufacture of a medicament to treat hearing loss.

[0716] Embodiment 103. Use of the construct of embodiment 100, the composition of embodiment 100, or the particle of embodiment 101, wherein the hearing loss is DFNA2.

[0717] Embodiment 104. Use of the construct of embodiment 100, the composition of embodiment 101, or the particle of embodiment 102, or the use of embodiment 103, wherein the endogenous KCNQ4 gene product demonstrates reduced expression.

[0718] Embodiment 105. The use of embodiment 104, wherein a codon modified exogenous KCNQ4 gene product is expressed.

[0719] Embodiment 106. The use of any one of embodiments 103-105, wherein an exogenous KCNQ4 gene product is expressed from the construct of embodiment 6.

[0720] Embodiment 107. The use of any one of embodiments 103-106, wherein the endogenous KCNQ4 gene product demonstrates reduced expression as compared to expression demonstrated by the exogenous KCNQ4 gene product.

[0721] Embodiment 108. A cell comprising a coding sequence operably linked to a promoter, wherein the coding sequence encodes a Kv7.4 protein.

[0722] Embodiment 109. A cell comprising a coding sequence operably linked to a promoter, wherein the coding sequence encodes a loss-of-function KCNQ4 variant gene product.

[0723] Embodiment 110. A population of cells comprising one or more cells according to embodiment 108 or 109, wherein the population is or comprises a stable cell line.

[0724] Embodiment 111. The method of any one of embodiments 85-90, wherein the KCNQ4 gene product is a Kv7.4 protein.

[0725] Embodiment 112. A construct comprising an inhibitory nucleic acid, wherein the inhibitory nucleic acid is or comprises one or more of miR1-155; miR2-155; miR4-155; miR5-155; miR6-155; miR7-155 miR1-16; miR1-26; miR1-96; miR1-122; miR1-135; miR1-182; miR1-183; miR1-335; miR1-451.

[0726] Embodiment 113. An miRNA selected from the group consisting of miR1-155; miR2-155; miR4-155; miR5-155; miR6-155; miR7-155; miR1-16; miR1-26; miR1-96; miR1-122; miR1-135; miR1-182; miR1-183; miR1-335; miR1-451 and combinations thereof.

[0727] Embodiment 114. A kit comprising a composition of any one of embodiments 1-113.

[0728] Embodiment 115. The kit of embodiment 114, wherein the composition is pre-loaded in a device.

[0729] Embodiment 116. The kit of embodiment 115, wherein the device is a microcatheter.

[0730] Embodiment 117. The kit of embodiment 116, wherein the microcatheter is shaped such that it can enter the middle ear cavity via the external auditory canal and contact the end of the microcatheter with the RWM.

[0731] Embodiment 118. The kit of embodiment 116 or 117, wherein a distal end of the microcatheter is comprised of at least one microneedle with diameter of between 10 and 1,000 microns.

[0732] Embodiment 119. The kit of any one of embodiments 114-118, further comprising a device.

[0733] Embodiment 120. The kit of embodiment 119, wherein the device is a device described in FIGS. 32-35 or a device as described herein.

[0734] Embodiment 121. The kit of embodiment 120, wherein the device comprises a needle comprising a bent portion and an angled tip.

### EQUIVALENTS

[0735] It is to be understood that the words which have been used are words of description rather than limitation, and that changes may be made within the purview of the appended claims without departing from the true scope and spirit of the invention in its broader aspects.

[0736] While the present invention has been described at some length and with some particularity with respect to the several described embodiments, it is not intended that it should be limited to any such particulars or embodiments or any particular embodiment, but it is to be construed with references to the appended claims so as to provide the broadest possible interpretation of such claims in view of the prior art and, therefore, to effectively encompass the intended scope of the invention.

[0737] It is to be understood that while the disclosure has been described in conjunction with the detailed description thereof, the foregoing description is intended to illustrate and not limit the scope of the present disclosure, which is defined by the scope of the appended claims. Other aspects, advantages, and modifications are within the scope of the following claims.

[0738] All publications, patent applications, patents, and other references mentioned herein are incorporated by reference in their entirety. In case of conflict, the present specification, including definitions, will control. In addition, section headings, the materials, methods, and examples are illustrative only and not intended to be limiting.

1.-102. (canceled)

103. A method comprising introducing into an inner ear of a subject a composition formulated at a dose of about 3.0E9 vg/cochlea to about 1.3E10 vg/cochlea,
wherein the composition comprises a construct, wherein the construct comprises a coding sequence operably linked to a promoter, wherein the coding sequence encodes a Kv7.4 protein.

104. The method of claim 103, wherein the composition is formulated at a dose of 3.0E9 vg/cochlea.

105. The method of claim 103, wherein the composition is formulated at a dose of 5.5E9 vg/cochlea.

106. The method of claim 103, wherein the composition is formulated at a dose of 7.0E9 vg/cochlea.

107. The method of claim 103, wherein the composition is formulated at a dose of 9.4E9 vg/cochlea.

108. The method of claim 103, wherein the composition is formulated at a dose of 1.3E10 vg/cochlea.

109. The method of claim 103, wherein the composition is a pharmaceutical composition, and wherein the pharmaceutical composition comprises a pharmaceutically acceptable carrier.

110. The method of claim 103, wherein the composition is introduced via a round window membrane injection.

111. The method of claim 103, further comprising measuring a hearing level of the subject.

112. The method of claim 111, wherein a hearing level is measured by performing an auditory brainstem response (ABR) test or a distortion product otoacoustic emissions (DPOAE) test.

113. The method of claim 111, further comprising comparing the hearing level of the subject to a reference hearing level.

114. The method of claim 113, wherein the reference hearing level is a published or historical reference hearing level.

115. The method of claim 113, wherein the hearing level of the subject is measured after the composition is introduced, and the reference hearing level is a hearing level of the subject that was measured before the construct was introduced.

116. The method of claim 115, wherein a decrease in an ABR threshold indicates that the subject's hearing level has improved or increased.

117. The method of claim 115, wherein a decrease in a DPOAE threshold, the presence of a DPOAE threshold, and/or a normal DPOAE morphology indicates that the subject's hearing level has improved or increased.

118. The method of claim 103, wherein the method is for treating hearing loss.

119. A composition comprising a construct, wherein the construct comprises a coding sequence operably linked to a promoter, wherein the coding sequence encodes a Kv7.4 protein,
wherein the composition is formulated at a dose of about 3.0E9 vg/cochlea to about 1.3E10 vg/cochlea.

120. The composition of claim 119, wherein the composition is formulated at a dose of 3.0E9 vg/cochlea.

121. The composition of claim 119, wherein the composition is formulated at a dose of 5.5E9 vg/cochlea.

122. The composition of claim 119, wherein the composition is formulated at a dose of 7.0E9 vg/cochlea.

123. The composition of claim 119, wherein the composition is formulated at a dose of 9.4E9 vg/cochlea.

124. The composition of claim 119, wherein the composition is formulated at a dose of 1.3E10 vg/cochlea.

125. The composition of claim 119, wherein the composition is a pharmaceutical composition, and wherein the pharmaceutical composition comprises a pharmaceutically acceptable carrier.

126. A composition comprising a construct, wherein the construct comprises a sequence according to SEQ ID NO: 332, SEQ ID NO: 333, SEQ ID NO: 334, SEQ ID NO: 335, SEQ ID NO: 336, SEQ ID NO: 337, SEQ ID NO: 338, SEQ ID NO: 339, SEQ ID NO: 340, SEQ ID NO: 341, SEQ ID NO: 342, SEQ ID NO: 343, SEQ ID NO: 344, SEQ ID NO: 345, SEQ ID NO: 346, SEQ ID NO: 347, SEQ ID NO: 348, SEQ ID NO: 349, SEQ ID NO: 350, SEQ ID NO: 351, SEQ ID NO: 352, SEQ ID NO: 353, SEQ ID NO: 354, or SEQ ID NO: 355, with or without a FLAG sequence.

127. An adeno-associated virus (AAV) particle comprising a construct, wherein the construct comprises a sequence according to SEQ ID NO: 332, SEQ ID NO: 333, SEQ ID NO: 334, SEQ ID NO: 335, SEQ ID NO: 336, SEQ ID NO: 337, SEQ ID NO: 338, SEQ ID NO: 339, SEQ ID NO: 340, SEQ ID NO: 341, SEQ ID NO: 342, SEQ ID NO: 343, SEQ ID NO: 344, SEQ ID NO: 345, SEQ ID NO: 346, SEQ ID NO: 347, SEQ ID NO: 348, SEQ ID NO: 349, SEQ ID NO: 350, SEQ ID NO: 351, SEQ ID NO: 352, SEQ ID NO: 353, SEQ ID NO: 354, or SEQ ID NO: 355, with or without a FLAG sequence.

The application's sequence listing, which the Patent Office published only in electronic form, follows.

SEQUENCE LISTING (355 sequences)

SEQ ID NO: 1 - RNA, 4324 nt, Homo sapiens
  source 1..4324: mol_type = other RNA
gacatgtgagcggcgcgcgccggtggcaggtggaaaggcgagcggcatggagcgcgtaataagagagttggagtcggaaagagcagccccagtcgccggggaagcgggaggtcagtgcgggctccggcggcccccaggctccgagcgcccgcccgcggccccggcccggcccctagcccccgccgcccgcgcccgccccgggtcgcccctctggccccgggtccgagccatgcgtctctgagcgccccgagcgcgcccccgccccggaccgtgcccgggccccggcgcccccagcccggcgccgcccatggccgaggcccccccgcgccgcctcggcctgggtcccccgcccggggacgccccccgcgcggagctagtggcgctcacggccgtgcagagcgaacagggcgaggcgggcgggggcggctccccgcgccgcctcggcctcctgggcagccccctgccgccgggcgcgcccctccctgggccgggctccggctcgggctccgcctgcggccagcgctcctcggccgcgcacaagcgctaccgccgcctgcagaactgggtctacaacgtgctggagcggccccgcggctgggccttcgtctaccacgtcttcatatttttgctggtcttcagctgcctggtgctgtctgtgctgtccactatccaggagcaccaggaacttgccaacgagtgtctcctcatcttggaattcgtgatgatcgtggttttcggcttggagtacatcgtccgggtctggtccgccggatgctgctgccgctaccgaggatggcagggtcgcttccgctttgccagaaagcccttctgtgtcatcgacttcatcgtgttcgtggcctcggtggccgtcatcgccgcgggtacccagggcaacatcttcgccacgtccgcgctgcgcagcatgcgcttcctgcagatcctgcgcatggtgcgcatggaccgccgcggcggcacctggaagctgctgggctcagtggtctacgcgcatagcaaggagctgatcaccgcctggtacatcgggttcctggtgctcatcttcgcctccttcctggtctacctggctgagaaggacgccaactccgacttctcctcctacgccgactcgctctggtgggggacgattacattgacaaccatcggctatggtgacaagacaccgcacacatggctgggcagggtcctggctgctggcttcgccttactgggcatctctttctttgccctgcctgccggcatcctaggctccggctttgccctgaaggtccaggagcagcaccggcagaagcacttcgagaagcggaggatgccggcagccaacctcatccaggctgcctggcgcctgtactccaccgatatgagccgggcctacctgacagccacctggtactactatgacagtatcctcccatccttcagagagctggccctcttgtttgagcacgtgcaacgggcccgcaatgggggcctacggcccctggaggtgcggcgggcgccggtacccgacggagcaccctcccgttacccgcccgttgccacctgccaccggccgggcagcacctccttctgccctggggaaagcagccggatgggcatcaaagaccgcatccgcatgggcagctcccagcggcggacgggtccttccaagcagcatctggcacctccaacaatgcccacctccccaagcagcgagcaggtgggtgaggccaccagccccaccaaggtgcaaaagagctggagcttcaatgaccgcacccgcttccgggcatctctgagactcaaaccccgcacctctgctgaggatgccccctcagaggaagtagcagaggagaagagctaccagtgtgagctcacggtggacgacatcatgcctgctgtgaagacagtcatccgctccatcaggattctcaagttcctggtggccaaaaggaaattcaaggagacactgcgaccgtacgacgtgaaggacgtcattgagcagtactcagcaggccacctggacatgctgggccggatcaagagcctgcaaactcgggtggaccaaattgtgggtcgggggcccggggacaggaaggcccgggagaagggcgacaaggggccctccgacgcggaggtggtggatgaaatcagcatgatgggacgcgtggtcaaggtggagaagcaggtgcagtccatcgagcacaagctggacctgctgttgggcttctattcgcgctgcctgcgctctggcacctcggccagcctgggcgccgtgcaagtgccgctgttcgaccccgacatcacctccgactaccacagccctgtggaccacgaggacatctccgtctccgcacagacgctcagcatctcccgctcggtcagcaccaacatggactgagggacttctcagaggcagggcagcacacggccagccccgcggcctggcgctccgactgccctctgaggcctccggactcctctcgtacttgaactcactccctcacggggagagagaccacacgcagtattgagctgcctgagtgggcgtggtacctgctgtgggtgccagcgccccttccccacctcaggagcgtgagatgccaggtcgcacagagggcagcagcagcggccgtcccgcggcctctgggccccccagtgccctgcccactccatcaaggccctatgtggcccacctggcaggggcacagccccgggagtgggagcgggcgctggggccctgggccctgacccagcttccagctatgcaaggtgaggtctctggcccacccttcggacacagcagggaagccctcccgccaagtccccgccccacttgggggtgggccaaggtgcccccacaggtacccacaaagcacaggaccctgccacaaggcaggtggacaccatatatgcaaaccatgttaaatatgcaactttggggacccccatggggtctctctgtccctcccccattgggagctgggcccccagcagtagctggtctcaggctgcttggccaccaccctgtccctattctttggcttatcactccttcccctcccagcatggggcctgtttctcccctgccctctcctaagggcaatgcctgggcctttcttcccatttgcaagtgtcagctcccaggggctccctcctcctgctgggtggccactcccctccttggccctccagacaccactcatagtcagcacaggtttctgtatcctccccaaaactcccagacagtgcttcgtggacgatcgcacaaacatagccttttagtttctccagacaggaagaaagcctctcacacttaaacatgcaatgacgtgacacacttggagacatgagtgcagagccactcagccgctcctgggcctctgcagcagatgccagtggactggccttgcagggtgacgaccactaagaggaagacccccaactccatctgagcaggagaaggagctttgaagtaacccgagagctctccaggccccacccagacctttacccgctccccttcttcaagaagatctcctcctctctggtccaggagccctaacccactgcctctgcctgtccccaagggcccgcctccgtgtctccacagcacaactcgggcccaggcctgacaccactggagagaccccaggcccacttctagccaggcctgtgccttcctagtcactctaactcccagagagaataagaatgcatgtaatagctataccaaccgcgcatccggctttcacatgcactgtctcccctccctccacaccccacttcttcacttcaattggcagcgccacatccaggcgtcagcccccattcactccaggaacactttcttatccccacccctttgctcctcttctgcaaagccaatgcaggtggcaggaaggtgaggggtagtggaccaatggcaaccctctgtgggaacaaggggccgaggccacgctgcctgcatctcgtgctggggacctgcatgcgccagcaccagggcttggactggatcttactcagtccatggtgcccagcctctgccccaacatgccctctgcatgtgaccgtcatgccctggatggagccactcctggctcaccccacctgcactgcactgtccccagagagccacccctccacccactcagagacagctgtggagagggccaggagaatgggattaccctatgaccaaggagacatgggaagaagccctccttccttccacgatcgaggttccgccatcaactcggttctcggatatgcaagtacctcactttgttaacttattaacttattggtttcattaaagttttcaagagga

SEQ ID NO: 2 - DNA, 2088 bp, Homo sapiens
  source 1..2088: mol_type = other DNA
atggccgaggcccccccgcgccgcctcggcctgggtcccccgcccggggacgccccccgcgcggagctagtggcgctcacggccgtgcagagcgaacagggcgaggcgggcgggggcggctccccgcgccgcctcggcctcctgggcagccccctgccgccgggcgcgcccctccctgggccgggctccggctcgggctccgcctgcggccagcgctcctcggccgcgcacaagcgctaccgccgcctgcagaactgggtctacaacgtgctggagcggccccgcggctgggccttcgtctaccacgtcttcatatttttgctggtcttcagctgcctggtgctgtctgtgctgtccactatccaggagcaccaggaacttgccaacgagtgtctcctcatcttggaattcgtgatgatcgtggttttcggcttggagtacatcgtccgggtctggtccgccggatgctgctgccgctaccgaggatggcagggtcgcttccgctttgccagaaagcccttctgtgtcatcgacttcatcgtgttcgtggcctcggtggccgtcatcgccgcgggtacccagggcaacatcttcgccacgtccgcgctgcgcagcatgcgcttcctgcagatcctgcgcatggtgcgcatggaccgccgcggcggcacctggaagctgctgggctcagtggtctacgcgcatagcaaggagctgatcaccgcctggtacatcgggttcctggtgctcatcttcgcctccttcctggtctacctggctgagaaggacgccaactccgacttctcctcctacgccgactcgctctggtgggggacgattacattgacaaccatcggctatggtgacaagacaccgcacacatggctgggcagggtcctggctgctggcttcgccttactgggcatctctttctttgccctgcctgccggcatcctaggctccggctttgccctgaaggtccaggagcagcaccggcagaagcacttcgagaagcggaggatgccggcagccaacctcatccaggctgcctggcgcctgtactccaccgatatgagccgggcctacctgacagccacctggtactactatgacagtatcctcccatccttcagagagctggccctcttgtttgagcacgtgcaacgggcccgcaatgggggcctacggcccctggaggtgcggcgggcgccggtacccgacggagcaccctcccgttacccgcccgttgccacctgccaccggccgggcagcacctccttctgccctggggaaagcagccggatgggcatcaaagaccgcatccgcatgggcagctcccagcggcggacgggtccttccaagcagcatctggcacctccaacaatgcccacctccccaagcagcgagcaggtgggtgaggccaccagccccaccaaggtgcaaaagagctggagcttcaatgaccgcacccgcttccgggcatctctgagactcaaaccccgcacctctgctgaggatgccccctcagaggaagtagcagaggagaagagctaccagtgtgagctcacggtggacgacatcatgcctgctgtgaagacagtcatccgctccatcaggattctcaagttcctggtggccaaaaggaaattcaaggagacactgcgaccgtacgacgtgaaggacgtcattgagcagtactcagcaggccacctggacatgctgggccggatcaagagcctgcaaactcgggtggaccaaattgtgggtcgggggcccggggacaggaaggcccgggagaagggcgacaaggggccctccgacgcggaggtggtggatgaaatcagcatgatgggacgcgtggtcaaggtggagaagcaggtgcagtccatcgagcacaagctggacctgctgttgggcttctattcgcgctgcctgcgctctggcacctcggccagcctgggcgccgtgcaagtgccgctgttcgaccccgacatcacctccgactaccacagccctgtggaccacgaggacatctccgtctccgcacagacgctcagcatctcccgctcggtcagcaccaacatggactga

SEQ ID NO: 3 - DNA, 1926 bp, Homo sapiens
  source 1..1926: mol_type = other DNA
atggccgaggcccccccgcgccgcctcggcctgggtcccccgcccggggacgccccccgcgcggagctagtggcgctcacggccgtgcagagcgaacagggcgaggcgggcgggggcggctccccgcgccgcctcggcctcctgggcagccccctgccgccgggcgcgcccctccctgggccgggctccggctcgggctccgcctgcggccagcgctcctcggccgcgcacaagcgctaccgccgcctgcagaactgggtctacaacgtgctggagcggccccgcggctgggccttcgtctaccacgtcttcatatttttgctggtcttcagctgcctggtgctgtctgtgctgtccactatccaggagcaccaggaacttgccaacgagtgtctcctcatcttggaattcgtgatgatcgtggttttcggcttggagtacatcgtccgggtctggtccgccggatgctgctgccgctaccgaggatggcagggtcgcttccgctttgccagaaagcccttctgtgtcatcgacttcatcgtgttcgtggcctcggtggccgtcatcgccgcgggtacccagggcaacatcttcgccacgtccgcgctgcgcagcatgcgcttcctgcagatcctgcgcatggtgcgcatggaccgccgcggcggcacctggaagctgctgggctcagtggtctacgcgcatagcaaggagctgatcaccgcctggtacatcgggttcctggtgctcatcttcgcctccttcctggtctacctggctgagaaggacgccaactccgacttctcctcctacgccgactcgctctggtgggggacgattacattgacaaccatcggctatggtgacaagacaccgcacacatggctgggcagggtcctggctgctggcttcgccttactgggcatctctttctttgccctgcctgccggcatcctaggctccggctttgccctgaaggtccaggagcagcaccggcagaagcacttcgagaagcggaggatgccggcagccaacctcatccaggctgcctggcgcctgtactccaccgatatgagccgggcctacctgacagccacctggtactactatgacagtatcctcccatccttcagcagccggatgggcatcaaagaccgcatccgcatgggcagctcccagcggcggacgggtccttccaagcagcatctggcacctccaacaatgcccacctccccaagcagcgagcaggtgggtgaggccaccagccccaccaaggtgcaaaagagctggagcttcaatgaccgcacccgcttccgggcatctctgagactcaaaccccgcacctctgctgaggatgccccctcagaggaagtagcagaggagaagagctaccagtgtgagctcacggtggacgacatcatgcctgctgtgaagacagtcatccgctccatcaggattctcaagttcctggtggccaaaaggaaattcaaggagacactgcgaccgtacgacgtgaaggacgtcattgagcagtactcagcaggccacctggacatgctgggccggatcaagagcctgcaaactcgggtggaccaaattgtgggtcgggggcccggggacaggaaggcccgggagaagggcgacaaggggccctccgacgcggaggtggtggatgaaatcagcatgatgggacgcgtggtcaaggtggagaagcaggtgcagtccatcgagcacaagctggacctgctgttgggcttctattcgcgctgcctgcgctctggcacctcggccagcctgggcgccgtgcaagtgccgctgttcgaccccgacatcacctccgactaccacagccctgtggaccacgaggacatctccgtctccgcacagacgctcagcatctcccgctcggtcagcaccaacatggactga

SEQ ID NO: 4 - DNA, 1071 bp, Homo sapiens
  source 1..1071: mol_type = other DNA
atgccggcagccaacctcatccaggctgcctggcgcctgtactccaccgatatgagccgggcctacctgacagccacctggtactactatgacagtatcctcccatccttcagagagctggccctcttgtttgagcacgtgcaacgggcccgcaatgggggcctacggcccctggaggtgcggcgggcgccggtacccgacggagcaccctcccgttacccgcccgttgccacctgccaccggccgggcagcacctccttctgccctggggaaagcagccggatgggcatcaaagaccgcatccgcatgggcagctcccagcggcggacgggtccttccaagcagcatctggcacctccaacaatgcccacctccccaagcagcgagcaggtgggtgaggccaccagccccaccaaggtgcaaaagagctggagcttcaatgaccgcacccgcttccgggcatctctgagactcaaaccccgcacctctgctgaggatgccccctcagaggaagtagcagaggagaagagctaccagtgtgagctcacggtggacgacatcatgcctgctgtgaagacagtcatccgctccatcaggattctcaagttcctggtggccaaaaggaaattcaaggagacactgcgaccgtacgacgtgaaggacgtcattgagcagtactcagcaggccacctggacatgctgggccggatcaagagcctgcaaactcgggtggaccaaattgtgggtcgggggcccggggacaggaaggcccgggagaagggcgacaaggggccctccgacgcggaggtggtggatgaaatcagcatgatgggacgcgtggtcaaggtggagaagcaggtgcagtccatcgagcacaagctggacctgctgttgggcttctattcgcgctgcctgcgctctggcacctcggccagcctgggcgccgtgcaagtgccgctgttcgaccccgacatcacctccgactaccacagccctgtggaccacgaggacatctccgtctccgcacagacgctcagcatctcccgctcggtcagcaccaacatggactga

SEQ ID NO: 5 - DNA, 63666 bp, Homo sapiens
  source 1..63666: mol_type = other DNA
gcaggaccacagcactgttgccttctgcatggtcttccagaggtagaggttagaggaaggatcttacaggaagaatcctgaaggcagaggaggagccctgcaagaagggagggctttgaccttcatttccacgcccctttctccctctgtgtctcctctgtgtgggccccctccagccctgaggatcaatgggggttcactttcactgagctcagcaacactgctccctccccacttcctgtggctctgagctgactggcctgcttggtctaggctgggggctggtcagtgccacacccagatctggggaaaagaaattccttggctggcgaggtggctcacgcctgtaatcccagcactttgggaggccaagacgggcggatcaggaggtcaggagatcgagaccatcctggctaacacggtgaaaccccgtctctactaaaaatacaaaaaaattagccaggcatggtggcgggcgcctgtagtgccagctacttgggaggctgaggcaggagaatggtgtgaacccgggaggcagagcttgcagtgagccgagattgcgccactgcactccagactgggcaacagagcgagactccatctcaaaaaaaaaaaaaaaaggaaaagaaaaagaaattccttgggcccctccagcacctcgtggcctaagtctcttgtcctttctgggctgcacagggaaaaggaagaaggccttatctttctctcatgcttcctcctgctctcagtagaggtgggttcccaaaggtcaataatgtgatgccatcaccccctgagcactctccactccaatcccctcctaggaaggcttcctagattgagaagaactgctaggaccagggaattcccagagcatctccctgctccacctgaaacacgtacctgaagagcagtcagacgaatgggtcacgtgcgtacagccccctgcatggtctctaactttttcatgcattattgcattcagtgctgatagccagggaaagtggggaagaggtggagtgacttgcccaaggtccccaggtattccacaggtggagctaggactggaagcccagccatgacttgtagtttagggctctttctgcccctggcactgccagcctctctggatgctggtgcctcccacttcacccatcctgggttctctcctagggagccacagcctctgcagcatgcccagcctcagggcctggccaggctccctgtttcttatcaggccaaattggaccctccatcctggcattcaagtcctcctgcgtgcccctggctaagcttgctcttccgaatgctctgtaacattcttcccacaccagtacacacacacacacacacacacacacacacacacacacacacattaaagcagcacctgagtgaattaacagccatacaaggcaagtctcttcactgagcctcagtcttcttgagtgtaacatgggaccgtgaacagtattaccgcacaaggttgtggggatgctgaaatagacaatgcaggtaaaacatcctgcataaggcttaggattgactgcaggcctcattaatggtagctgcaggcattattggttgtacttctctgcgtctctcccagtcctccccactcctgtccccaagaaagctccctctgccattgcctgtggagacttctccctcctctgagctctagcaacccttggagctgtaagaaagcccagggtcaggtggctagcaggcagagagattttaggaggcaagtgagtggaacccagacctcctcgcctcgattcaactagcgcacttctgctccaaagctttgtacacattggggtgctaccttacaattctgtcggtaaaaaggattccattgctgataaagtctaaaaatcactgacttaaaccaccccacctctcactccaggaaaggaacctgagcccttgattgacctggggtcacagtgggaatcactgacaggcttgagcctagcctgagagaccatagtcctagccacttcctgccctccatcctttcagacctggaagtttgatcccttggcacgagtaagttctagagaacaaggattggccgtgtatggttatcctcagctcccagcacccagtgcccagccggcaggtgccagtcagtggaaagcacaggtcacagttctgggggtcaccaataggctgtgtagacttaggtgagtccctgtgcctctcagagcctcagctgtctcaagcaagctgctgctctctggcccaaaagggactgggcctggcacacagatggcactcagcaaatggaagcactcgccctcccacccttcctctcagtcaatacttgctccattgatggctgatggggacagtgatgaattacagaagatcttggagccctgcccacttcttgcacagatggggaaacaagtccagggtggggaagagacttgcccaggtgggagtgagtcttagtgagtgcgtctgtctcctcagtggggcagggaagctttcgcagtgttaccagggtggagacagggcctgggggtggaaaggaaactgctgagggtggggtcaggggaacaggtgggagagggaaggaggagggtagggaaccacggtgtccagtcccctccagcagaggggccaattgagggagcctgagacagctgtttgctcagaaaagtgtcttagtcactaaaggttgtggtggggaaagtccgtcctcccagtcatgtcctgggaatccggatggcgcaggaaggccacccggtgaccctaagagtggccacctgtcctctctgaactggactttctcttctggcccttccactcttccatgtgtacacatatgccaagtaaatttgctgtggcctcctggaaccatctcccccatccctctcaccccttaggaagagttctgtgtccctccattacccatacgcccgcaggagaaacaggcttctatgccctatgaaagtccttcctgagatctaacttccatccctctagctgcaaccacagtctctttcctctttctgctgcctttgagcaggtaatctggagctggagttgggaatgatgagacactccctgcagtgagggctcctcacaaggtggggaagggacctttgtagtcccccagctgggaagagagccatgggatccagaggtgatgctgagcttgaagattagatttcccagaacagacccagtttcagatattctgggtgttaagggcaacctgaattcaaattccatttctgctacagaacaagagcctcaaaaagaccccctagaaacacccccagggcgcttgcaactgctttcctgtgcacctttcatgtcctagaccttagtcccatttcccaggatctatgattgagaagaaccagccaggcagttccacagagggaggacagtgctgcatattttgggggtgccatcttcagctcatagagagaagatgggttaactcagcccaggcaccacatccctagtggggccttggggtccagaaactgtccccagcttccagtagaggatccgggcataacctgccctggggcacccggctctggccctgggcacacctggaccaggagcagcagaagagattcaggtcagaccccagagggcacccccagctaggcagaggggaaaggatcactatggggtaggggtgtgggccggttgccaagcccagtttagggaccccacagatccctgcagcccacggccctgcctccctccctccctcactggcgctcagcagatcaatgctgcctttgctgacagctgagaatcgagctcgccttcccgccccttcccccgcccctcccgctcggcttcgtccctcgagatcctcccggaggaaccgggaagagtttgctgcggaaggctcaccctggggcagggcctgcggagggagcggctggtgtggccgcagctttccgtggaggaagagggaaagaggatcgggaaacccaagttaccaaccctgtgcagggcccaggagggctaaaggagagggactgccccctacagccagagagatggaggtcggggactaagaaaaactttccagctggagagggaatgccctgggacaaagtatccccttttctggctgggattctgtgggccttgggtagggggtgtgtgtcccctctaaggctggcttagagctcatctcccaacactccatctgcccaaacccagttccctgacctgggagtggggcaggggagcaggcccctccatcggggaggatcctcttctgggcagggtggctcttcccccatcacgatgaagggaagctcagaggtggcagttggtgggagaaagacacacccaggcccactgtgttccacacaccctgatgctgcctagcagcccgtgggctccaggcctttcaggtaagagcaggacaaccgccgctgcccacccagccacacacagcactgggcacactttaagcacccgcaccaggcacacagtgctcgaccccaacggacacacctcatccccttcggactccacctccactttcgcagccacccacacccgacccataactcacacctcactgactccatccccgcacctggtagacccacagccacccaccctgcacacacaagtagacgccgttccaccggtctacacctaaactccacgggacactgcgtcccttcccctgccgcccgcggccacaactccacattccactttccacaagcacacacgaggcgtcccaccccgggctggccttcggggccacactgccccacgcagcggtggacaccacttgcacgcgtccggcttcccggccccgcgcgctgcccccgccacgcggttcggcccaggcaccaactcggccgcccgtgcgccctgccccgccgcctgctccgcgcgttccctccctccgcctcgcctcgcttgctcgctcgctccctcccgatttgggaaggcggccgcggggcgggcgggggaggggcggggcgggggagggtgacatgtgagcggcgcgcgccggtggcaggtggaaaggcgagcggcatggagcgcgtaataagagagttggagtcggaaagagcagccccagtcgccggggaagcgggaggtcagtgcgggctccggcggcccccaggctccgagcgcccgcccgcggccccggcccggcccctagcccccgccgcccgcgcccgccccgggtcgcccctctggccccgggtccgagccatgcgtctctgagcgccccgagcgcgcccccgccccggaccgtgcccgggccccggcgcccccagcccggcgccgcccatggccgaggcccccccgcgccgcctcggcctgggtcccccgcccggggacgccccccgcgcggagctagtggcgctcacggccgtgcagagcgaacagggcgaggcgggcgggggcggctccccgcgccgcctcggcctcctgggcagccccctgccgccgggcgcgcccctccctgggccgggctccggctcgggctccgcctgcggccagcgctcctcggccgcgcacaagcgctaccgccgcctgcagaactgggtctacaacgtgctggagcggccccgcggctgggccttcgtctaccacgtcttcatgtgagtttgcgaccccgcgcccttccgcgtttccccgcgcaagcctggcctcccggggcacggccgccccgccctggctccgccttctacccccctgcctcagggccgaccctcatctctctccccccaggcctaagcccggtttctgatcccctcgctgagcccgaccctaagccctgatctcccaggcctgacccctgcttgacctcgcttctgacctccccgcaccgcaactgcttatttccatcctgaccgccaatctctgctcctctgtcccaggtactcccgaccgccagctgcctcccccaagtccgcttggcgaagtctggggcccctggagtgggcgcccttttcctcttccccacccctgcctccctgtgtcccagacacaaagaggaacccttggctcccacacgcttctgtcacctgctccccagctctgagctatgaagggctcccctcaggggtgctcctctccagggcggccctcattcctacccctgcccagctgactgtgggtgtgtgggggtccctgtgggccccctgggccctgacactcgcatatgctgtgtccgacttgatctgtgtcttcgctcagtcttcccctccaccctcaacttcccagtggcaacggcggccgccctgcctgccctgccctaccctgccggcttggcccagctcgcctgccttgttggctggcagcaccaggcctggctctaggcaccaggggaaaaagaaagaggagaggggtaggtttggaaacactgacgctgctggggccccctcctccctctcaccaggctcctacaactttcaaaaacactgacccctcttgggtgtgaagagtgaattttggcagctcagagctcagtcttggggtacggcctggcccagccaggaacatgagaggccccgcagatatcagttgaagggctgggcctgacgctgggacgctcagaggtgcccagagagagacctctggtccctggaaaatgtgtggctattaatccctttttgctgccaccagagagggccctttggcgctggggtctcctgggtggcccacctgcctgcccacctgactgtctagcagccctcctgctggcctggctgtccctctgccagcctgagtttccacctgtgtgcgagttggccagtctgctcacccttccacctaactgtccgcagtccttctgcttgcctgtttccatccatctgtggcctgtgcagttatccgggtgcctgtctgtgcatctgcctatccacctgtccacctgactgtccactcttcctctacctgtcttttccacctgtctctgggtctgtccttcggcctgtttctcgggtgcttgctggcctgcctctgccccatctgaactgggcccacataatttcagaggtgaaggggagaaagatgcggcacagggaggggcagggggggaagacagcagggctctctcggccattaagtgcgttgggggtggcaaccttgactctgtgcagagacctcagctgggctaggctggggcagagagttgaaattgctcaggacatgaggtcaagcttcggttcagggtcaacggtttgtagtagcccagtccttagtgtccattgggaggcctaggatgaatatttgtggctataaagaggcccgttggagtgaggaaggcccagggctggtggagttgggggtgaggggatggggactacttcttaggagtggctacagagcagcctccttgagtgcctaaggagggtgagacaccccccagagaacaactgtgccctccgtgggctcctcttgggaagggacttttccaaggcatggcagggcctggggaagccaatagggctctgaggtggggtccttacccccccaggcttggccttacagcccccacaagggtcagtggaggtgaaggacctgcctcctgtcccctggccagctgctgttggtgcctcctttgaaaggaccgccccttcctctccaggagctaatccactggcacctttgccccacatcctgccctttcctgatgccaggaaatgccctcgccagggccgtgcttgtcctgaccacttgtccccgggagcccagggccagggcatgtcttgggaactctgggggaagaagtatggtgtgaaagtgtcctggtgtttaaggatctcagggaattggtcacccatcttagaggtcaaaggggacagaggtgtcaggaaccccacctcttatgtgctctgtgacgttgggttgattgctgggcctctctgagctttaggtctgtaggttgtcaaagcgggtagaaaccccaaccttgcggcctctctcttggatgaggtaatagagtgggaaagagcttggtaagctccaggggcctgtctgagcttgaaagacggttgttattattggggctggaggagggggcccacacagaaggtctctcctgtttgtgaggagctccagatgtggggtttctcagtcacactgcagggtcttgccaggaagtacttcctgctgttggactcctagccagaccattacactttgggtcaaatcctttctcctcttcccaatctgcctcagtggcagcccaagtgaggggagtccagggagtactgttagctaggacccccttcccagagacgcaggctgtggcaggaggggccccagcagaagagcctgcaagagaagggctctgggcggggcgcagtggctctcacctgtaatcccagcactgtgagaggctgaggtgggaggatcgcttgagcctaggcaacatggtgagacccctgactctacaaaatttaaaaattagccgggcatggtggtgcacacctgtagacacaattacttgggaggctgaggtgggaggatcacttgaacccaggaattctaggctattgtgaactgtgattgcaccactgcattccagcctgagtgacaggatgagaccctatcaattaaaaaagagagagaaagagaagggctcaggaaggagggagctggggtgagaggagcgcattcgccctagggtatgcctccctcccatctgccagcccgtcccctctgagccccacacagaacctgcatctttctggctccaaaaggtgggagattgcctagagtacaagcccagatttggcctgtcctgcggcagctgcaagctctgggaagagaggactgctgactcctgtcttctcctgttgggatccagaatgaggggccactgagcccctctccaagctttccctctctctgtggaccctcagtctgatcaccaagctgcatccccctcctatgccccagtccctgatttaagccctgaagccttcacaggccctgctctctgaattttaagaaataccacctcgtggcccatcctgctcgctgagcccttatggggaatgctcgctgtccccttgctgccccctctcaaaggccactccagcttcccttgaagtcagagtgctggagggggctgagcaagaccctatctcccttcatcctccccagccactatgagccgcaggcctgccgctcccagcccccagggcccagcagactttctctatgtgaaggtttgcggctctgtaaacatcctccctcagccttgtccgtggggtcagaagctgtgggaatggggaggggaggaggtggcagcagcttctggggcccgcagactcctaacccccgagcccccgacctcccaccccggccatctgagaaagaacatcgcctgggttggaaatcatcccagcaaagtgtcctcagaaccctcaggcatccccgctaggtcagtcggtcctcacattttgacagccccattttacttgtaagaaaactgaggctctggagaccaaagtcacctgggaaatgagtagcagatacagcggactctgtgcagagacctcagctgggctaggccagggcagagagttgaaattgctcctgcttccttgtccaggactgttcgctccgttcctagtggccaccgggcttggctcttggagtctgaaatgaaatctctggttgtgtgtgcagcaccaactatgcacagggcaccctgctgagctctctctaaaccggtctcattgtgtccttctgcagccttgtgaggtgggcactgttatcctcctcatttgacagatggggaaactgggactcagcagaggccacccagttaatgtggaagagcctcagcccggagcgggggctgactgggagctgttgcgctcagcaccacagcctcagctagcagcaccccaagtccaggctcctcaagaacagcactcctgtgtcatctgtccgtccatcccagcaccccgcacacagtcagcagggggtgggcagtgatggcattttgtggaattgagtggaaactgccagcctcacccagtgcagccacgttttagttgtagaccacgtcactgctgcgtacctgtctgaatgtctcacacatgcactcactgcaacatcgacacacatgcacaaacacacacacagcatccatccaacaaaaagagttctagtttacagctgcccctaccttttccctgacttcacagacactcaccatggacacacacccgggcccgtggctccagcccagacccctaggacagaacaaagcttgctcctgtccttgagtttttggccttcacctatacacaactgcagggctgcccttgcgggtctgtgtgtatttgtgtagccaccttggagggcagcctcagaactgtggaggagcggggtggctggcctcgtagaacttcgctggcgtttgctcctcctggggggtcctcgggggtcctttgatctgaccttggggtatactgctgggtacaccaagacacagaaaggggcagctactcatccaaggtcacacctagtgagttagtggagaactgtgccaggaacccaagccttttgtctcccagatcaggactttagataacaattttcctaacctagccaacaggggagatggatgctctaagaactttgcccttgtgattgggaaagtctttgagtgtgacccaaatttttcgtgctgctgtttttcagccctagtccttttgcttggtctttgtaaggagctggggagaccatcctgttcttatactgccttcctcctcctccttgcactccccttcacgctcctttgcctccttcttctgaagttctttggtgtcactggagccggttcgatctctcactgacggcccaccccaccccaactccatagtacgttcattcttccattgaagacgcgctgctagatgtctaacttcaatccctattgctgccgaagcccttatccttgggatatttaagccaggagtgtttcaagaggtggttattattcttgggctgatggcagcactttgagtggatgattaatttcaggctctctgagccagtcaaaggagctggaactgcctgggagcagggaaaaaggaaggccgaggccctgcccacaaaggaggctgcccagggaacttccccagactccctcctacctccctagcaccaatgtgggtctttggggaaggtccgatcttcttgtgggctatggagccccccagcagggaattctgcatgtttgccctgggggaagctcctagtgtgggagttgagaggttgaggatgggggaatagcagggacttttcgtttctccagaagctgtcctgcggggagtgaagagcacgggctctgaggctgacagatctgcgttccttcctggttctagccttagcagtcgtgtgtccttgggcaagttacttaacctctctgggcttcagttttctcatctgaaaaatgggagtaatcataatacctgcctctaagattgtcaggactggatgagataaggcaccgaacactgctgggcactgttagccatgatcatcgttactgttattattatgctgttatcactgtcctcattcttctcctccggggagaggtgtggtaggtgtgctgggctcagcaaggtgagtgtgtctgagtctgctctggagagaataggagctatgtctgcctgtgtcctggggcgagtggttctccatgggagctgaggctgtgtcttttcagcctcctgtgggccctgcccatgagagtgtctgacttacattctctcgtgtaacgctcacagccatcttatcaggtgggtgctgtcttcttcatgtcacagttgagcaaagtgaggctgggtgaggggatgtcacccagctcatgaatggagcccagcctggctacctagcatgctcactgatttgtttcttccttcatctggcaaacagttacagagcatcagctccataccaggaccagggagccagagagagctagaccatgcctgtaccctgcctggcagagtgggggattgggggtcactgtgaggaggtcgcagagtctgccgggaccactggcctcagctgcttcttctcccagggagaggtttggagagaggtctggtctgtgtgtagctgtgagtgtgtctgtgagttatggggaggacggtgtatgccagagggccactgtgcggccgagtttgggcctcatggtccaaccctggcagctggcctggcccccgagagataaaagtagagccatggtgcccagagagacagccagggactcctgggagaggagggcactcccccactctctcctgagcaaatgatcatggagaatgagggcagggaatcccaagggagatttagagatctcagtccccatgcttactgggaaggtgtccacccccactccaccccagttcctgagcctcggtatcttcttctgtaaaatgggcctaacaggaaagtggacctctcagggctgcctggcacacagtcgtggtgggcaaatgagagagactgctgtctcaggaccttgaaatgcatagggtaccaggtagggagctctcttccagcatcttctctgggggcccctcaggtgacagggtgccacttcacagggcactcagggggctgcctgcccccagtggaggctctgaggggctggagaaagggtgctgagccgacctcagtggctacacagagcccccaggacttcaggttccctgggcaaccctgtccctggggcaggagctgcgtgccctggggatgaggcacaggaggggcagccccaggcagcagactaattgggctgggaatccgtgggcagcgcctgaggaagggaggcaacaggagctcagcgattccctccctcctcaccccacggagatttgggggacagtggatagagcagggtctctagcctaaaggatggagggaaaatcttgaggcacattctcctgagactccttggacacccaggccgggaaggtgggactggaggaaagctcactggaaataaatggagcatggttcccatcaaagcagaggagatggaggtcagacagcaggaaggactgcccaagaaccaggaggtgaatgagattttctgggatattgtttcaaaaacttggagccccctgtctagccgggctggacaacatttactcgaattgtccctatcaagcaaggaatggctccctactcccacagagcgaaagatggaggggagatgcctgttccctttgagcccaactttggcggggtgtgggtcgggggtggggtagggatcagatcgggtacccactggcttttgggcagtggtgggagggtcacaggctgctcctccttctctgccacttctctctgggagcctcgggcctgtccaggttgctgtctttgggtttattttttgctgggcttggctgtcccctgggaggggagggggcagggagagaaaggaaaagcaggaacagctttgtcagcacaatctcaggcgccttcgctactgcccgtcttggcccagctgccaccctctactggagggaccagcccctgggcacagtggggattcagaccctatggaacttcctcgcttagaggcaggaccagcaggaagggactaggcctttctacccccatcctctctccatatatccctgctatacagaacctcaggtctcagcgctggagcagatccacgggcttcatttcacaggtggggaaactgaggctagaagggacctgatggctcaagggcacagcccacacgggggccttttccaccttccctccttatggagtaacatgggagaaatgctgcctccctgctgcccgttccctgggtgaactcattcactcatctcattttccagcctctggggattggtggcagtctggtgggagagacgggggacggggaaaggacagtgtgacccatggcccagcagaggaagggaggtacaacctggggatgcacagaggctaggtgggggtatcaatccctcccctatatgctttttatcctaaaaaaatacattcgccctattttacagacagggggattaaggtgtaaagaagttaatgacttgcccaaagtcaacatagctgacaggtggtagaggcaggatttgaacctagcatgtgcatctctgggagccatgcatttggccactccaccatgctgcctccccaaggggcccctgtgggcccttctttcttttcttttctttctttcttttttttttttttttttttgaagcagggcctcactctgtcacccacgctggagtgcatgatcactatgatcactgcagactcaacctcctgggctcaagtgatccttccacctcaccctcctaaggagctgggactacaggcgcacaccaagacacccagctagtttttaaatttttctgtggagacagggtcttgctatgttgtccaggctgatctccaactcctggctccagcgatcctcccacggtggcctcgggagccaccatggctgcctgctgggcccttccttcttgaatgcaacccccctggctttcctcaaacctgcctctgtggcttttctctcttggttctatcagcaagcagctctgcctcctctttctgccccttgaatgttggggctttgtctcaagtcctcttcacagtacatagtttcagggggtggtctcatgcactcctacgacatcaggggtcacccctatgatgacagcctccgctctgcagtttcatccctgcgcttcctgcctgctgacacctctcctcctcattccctgggcatctcaaactcagcatctccctccaaacctgccctccttcctcaatccatgtgacagtgactccccgatccccagtgcccaagtcagaaatgccctccacacaagcatcctttgctctcacctaagaaatgacttacagtgtcccaaagcattgcgctgtttagtgcttctgtgcttttccttctgcctgcaactccctcccctcttctgcccactgcatcatctagctaactcctattcatccttcaactcccagtttgagcaccacctcttcttggaagcactccctatccccattacccccaggctcaactgagggcccttcagtgcccccagagttctgttcacccagccctgtgcgttttttgcttttctgcatgggactatgagaactgggtgtgtgggggttgaacacaattcttggcacatggtcagcaatgagtgaatgtttgatgaaggtggcattggggccaagtagtaaggatgagaagggttttgccaactagagagaagtggagaaaagacccctcagccctctgtgtggagcactgagctgtgggtgttcatgatttttatcccgagtgagctccaggtgaagggaacagcagagcaaaggccttgagatgggacttccttcccctcactcctttgccccaagacctgcagagcacagggccttgattgacaggctgtggaggtgggccttaccctgtgggcagtggggagccatacacggtgacaggccagggtggggacactggatgggaaccagggtttgactctttctgagtgagtgctgtgcagacgtgaggtcatctattttttccagtacccgctaggtagcaggcactattattgttcccattttgcagacaagaaactggggctcaaagaagagaaacaccacatactaagttacacagcttgtctgtggtcgagtcaagactcaaacccatgtcggcatcagggccaagcccgagctctaaatggttctcagcctcgccagctgacccaaggcagtttccagtggcctaaggcaaaactgaggagaataaggacggggtggcgactctttcataaagctaaatttattccacttaaaggactgtcttttagtatgagatgatgtcctttcttttatgaaatgatgggctgggaaaaaaatgtccttgcttggcaaaataaaaagttgacaaccttatgcagtccccaaagtgtttttggaaattttaccggtggtgcgtgaaatccctgagtctgggcgccatcccggctcctccccactgagctgtggagccagaagagggaggggtctggtagggacagagggatcaggggacagaggagcctcaggtcccgcactttgcagtgaggaccaacccaaggctctttcctaagattgggttgggcgggtgggggggtggggggcagatcagccagaatcaagggctcacccctcagttaaaggagcactggaccgggaggcagcaggcttgggctcagctcctgcctctgcttcctggaggctgtgtgatgccaggcaggtgacccaacctctctgaggcaccagcttccttatacatagaatgacaattgccatctgtccctgctcacctcacggggctgcttcctatagcaagtgcttggtaaactgcaaagtgctgtgaagaacaggggggttgtggtggttttaccttttttttttttttttttccttttgagacagagtcttactctttcacccaggctggaaggcagtggtgtgatcatggttcactgcagccttgaactcctgggctcaagcgatcctcctgcctcagcctttcatgtagctgagaccgcaggtgcacgtcacggcgctaggctaatttttaaattttttgtagagaggggatcttgttatgttgcccaggctggtttcgaattcctgtgctcaagcaattttcccaccctggcctcccaaagtgctgagattacggacatgagccactgcacccagccctggttttactgttcttatcttgccatcagaggatcccacttctctagggtcctgggcccctcatctcactttcacttttcacttgcactgctttgagccctgaggaagagacatatgggggagcggggcaggtggaatgacacaggccctgtaaaagcagggtggccacactagcaattcctgtcctcaggctcccctggaggacagctcagagatgcccaggctggagacctggggaactctaggaaaagaatgcacgaagctggagccaggctagagttctaagcacagactttgtcactgagtaataagattcatagtctaatctctaccaggtattgtgctaaatatttttcacactgcttcatttaatccttccaagagccctatgaggtaggtcctatcattatccccattggatggaagatgacactgaagcttaaaggtgaaacactgcccttgtcacacagccaggaagtggtgaatgcccaagaggacgggagttttctgggctcagctcagacaactgagtgcctggagaggccgagtgtgcaacgattctgtgacatgagagggtgggaacggtttgcaggactgtggtggggggccgagggggtaatcagtgcacatcaggggcaccgggttggggtcggaaggcaagagacacgatcctgctggctagcttctagcagtcacctccctctctgagtctcagcctccctctctgctctggctctcaataataacaaagataatactagcaggaccttactgagtgcttaccgtggaccagatgctgctctgagagcttgccacgccttctatcactttttcctctcaatgacactatgaggtaggtactgttattatgcctacttttcagatgaggaagttgaggcacaaagaggttacgtgacttgcctgggtacatgtagcagggccaggattctaaccacaagagtctagctctataggctgtgatcttacccacctaactcacccggactatgtctgcctgcttctaatggggggtgatattaggagaagttgagccttaaagttcaaggtcctgggccgggcgctgtggctcacgcctgtaatcccagcactttgggaggcagaggcaggcagaccacctgaggtcaggagttcgagactagcctggccaacatggtgaaaccccgtctctactgaaaatacaaaaaattatctgggtgtgatggtgcgcacctatagtcccagctacttgggaggttgaggcatcagaatcgcttaaacccgggaggtagaggttgcagtgagccgagatcgtgccactgcactccagcctggatgacagagtgagactccatcaaataaataaataaataaataaataaataaataaatacagttcaaggtcctgctcccaccccgattctaccctggggactcattccttccctctctcgccctttcatttgagaaaccttcacttctaaatgaagttcagctgcttatgccagtctccccgggccaggccctgtgccagactctggggacagagcaatgaatcagaccttcctctgctccctgggggagatgggctgggaagctggcagttaccaggcagggtgataagtgccactgtccaggcagcacggagtccagtgggagcccagcacagagggccaagccctgccccaatctgggcatggctgggaaggcttcccagaggaagaggcttaagttgagactgaaagatgagtagaagtaggagttagctaggtgaaaaggagcaaggaacagtgtttcaggcagagagaatagcacaggcagagacccagaagtgaggctgaacagggcatttgcaaagaacagcaagaagtcagaagagcgggatcctagaggaggcaagaggtatctggagaagaggctgggatgcaacagggccaggctcggcagtgaggacaccgggctggggagctgcagcttcctgagagggtgatgggaaggaagtgatgtcaggagtaacatggcagattcgtgttttagaaactcctttctgggactggcgaggaggatgctggaggggtaaggactctggcaaggagccctggggatgctaccaacttgtccccctttttcctttaccttccccccagggtccagcctcctgagtgcctcctccagagctattgaccaaccctgctcagggcctggctcaacctgacccggagccctaggactttgcctatagggaaagttcagctgcttatgcaaactctggcttggggggagatgtgtgtggttgagctgggagctggtggtgtgtgggggtggccttggaagcagagagggtgggtgcaggcgccgaggctgtctggaaagggagtctggggatataagcttggggtccatgggggtccctagaatagtggccttataatggctccaagagggtacactgggatttggcccagataatggagggacaccctggcgaaggggcagagtcctggcagttcagccagccccagctctgtctttttcttgaagctcaacagagtatggaaatcattggtctcacccagccccctcattcttctgagggggaaacaggctcagaacagggcagggactaaactcaggtcagcagtagagcccagaccagaacccaggctcagtccaagcatcttagttgtctccaatgatgataaataacagtgaaaacctttctgcagagcttcccaggggctggcctgggcttaggcaccctctggatggtcttgggcagacgtttttcacatctcgagccttagctcgaggtccaaaatactacctgtactgggaaggaggtcctctctcccactgacagtccacaaagccgttttaggcatgctggacccattgtgggctttacttattgtttgttcaatgaatcccactgaattcatgtaacaaccctggaggaagatactattatgctattttgtgctgaggctcagaaaggagaagtgacttgcccaaggtcattcagctgagaagttgctgacttagggctggactccaggggtccagatgcctgtctaggatccctgatggacacagccccatttttgagcctgcgctctcagcgaaaatcagttggtgtctcaacgagacccatcgtcagctgggcagggtgtgtgtatatatgtggaagctgggctgggctgctggctggaactcaagccacaccaacccctgtgcccctgtgtttggacctggctgcagctgctgcccgtgggggaaggggaccttgccacttgccctcctgcatcaagggttttttctccttggcctggctgcctgggcaaaggagctggctgtggcatgaccatgtgggcacctgccagcccctcccttgttggggtctggtcatctaatgcccttcacatgacaggcatggggtgggccctggctggggagagggatttgcactctcctaatccaagggctgcagccctccctctgtcttggccagggccgtgggagaggtttgtccttgccccatgcccagcagccccagctcagatccctggcatacacccagttcctctgcttggggccttcccctgtcctgcttctgctccccaccctcctactctgtgagcagaatcaggagctagggggcaatgctggggcattcaggactgatggaggtgcagtgctacatagcatgtgggactgaaggatgggggcgatgtcagggaggtttagggcacatgttggggcaaagttgagggaagatgattggggtgcagagcaggagtgtttggggctcatcctgggccaccccttcctggaaaaatttggctacaagtcagggaggcaaatgtgtgggccatgccccccccctcgctaggcagtaaacactgccgtcgcctgggagacaagaaaacatcttggtccccccacggttgtttataccaggactccctctccttctctggcctggtctggcctctccactcctgagctgggctacctgagttgagggtccagcccccggtcatggcaggaggccctggcagcacgcccactggcccccaccagggactgagcactcaccacctcctggtggcctgtcccattggaggccctaggtcttattgatcagaaacgtgctcccaagccttggcctccacgagggaggcctgggactgtgccctggatttgctccaacccactgcctgaatgcagtcactggcctcccggtaacctcagcttcccatgttcagtagcaggcaggatctagattagagcttttcaaactgtttcaagtcatagatctggttctttgaatgacacctgatacagaagcacaatatataaaacagatcaaagtagggctactctgggtggagtcacgggttggggcccagaattctacccactctatgccagcctatatggccctggcatatcaacccagagcctgtacatggtcctccttgctctagaacacattccaggtaaccctggaattccctggccaaatacttatgcctacttccagggtctgcacaggcccttctcccaggggctgtcagagcagccctaggctcaaggacggctgtttgtagtgggtatagcaaaagcccggaagagcaggctgaggcacccccaggagtgtacccaaggcccctcccagggagggatgggcccagtgtgggaagagaatctgaggatcggagggtagcaaggggctggctgtcccttccctgctggattccagcatgggattccaaggcatccaagaactaaaattcaaacctggtcttctaggtcattatgaaggtatatgtgtcaggaaggatagagcaaattttatttaaaagtttgttaacctgattgaaacttttaaatatttagacttatggtatgtgggtctccatttatactctctccccagtcctgccagagttaggggtgagcttgcatcaatcctccttccacccacccacctacctctgcagcaaccccaagacagccttacccagaactctcaggcttcacaggacagtgtggaagtcccactcgctgaaactcaaggccctggtgactgcatctttctgttcactccccagatactgtctgagcatcagctggggccagcctgggggttgtggaggagccagactggccttgccctagagggatggatctcagtgaggagtaagcgggtaggaacactctccctcttgtagaatagtgtgagaaggggtgcctgagggggcccacaggggccctggaatcctaacgaggggctaaagaagctcctctattcaaagccgatcatggatggatgaggtggaagagagacagcccaagaaggggagacagtacaaaagccaccaaggtggaaatgtacagggagtggagaagtcgagtgtcgctggtgcttaggatgtgtgtacagcctcaaacgctggtctaaggagcttgggttttctattttaacagtaagaagctgttgtaggattgtaaatggggtaggggctgaggaagaggcattcagactgcaaggtaagtggactggaggtggggatagggggctggaattgtggtggtcagtgagaggctggctggggggaaggggaatgggggtgagtcctgggctgaccaggaatgggacttgaggggctaggaagaaagaggggatcttaactctgctttctgggaccacatctcctatctcctcctcctttgttctgtctcagtttttgtcttcttctcctgctattccactgccctaggtctccaggctggggagaggggcactcaccctaaaccccctctccaaagcaggccacttcacacaagtggccaggcaagaggccgcagttgtataagaggcttttctcagctggctggactactcattcgttcatttattcattcattcactcaacatttattgagaacctacaatgcaccaggccctgcactaggttttggagagaaagtaggaacaagatcaagtacctgcattcatggagcttacattgaggggggcgggagaaccaggaactgtatctatccccggtgtctaccatctggcacctgtgcctgggctggatgcctgggaacagggactcttcccattacctactcatttgttccagctgccctgtgtcagcactcacctctctggacaatgacagaggagaaggggtcccatgcccaggatgccagccccagggagcacctgtctctgtaagaacagcctggccctcggggccaggacctgggctcaggcctagttcttcctactcactcctgactttgagccctttgcaaggacccgactttgatttctttatctgtcaggtgggatttggggaggtcctgaggaggcgaggggaccagaatactggacctcagctccagtattctcccttggtgggcaactcctttggctatgatgggagggggaagggggcttgggactcaatattatcatcattacccatacaagatagtaatagttgctacctattgtgtaatttattccgcactatctgtatggtcggtgtgtcttctctccccattttccggatgaggaaactgagtctccgtaaggtgaaatgacttacttgaggtcacacgtgaaactacctactccaagagccctttaggatggtgctgtgaggtggaagggcgaggccgaggcggcggtggcgtcgcgtcccccctctccgcccctggcctcggggacgcggcggcaccttcacactttccgcttggcccgctgctcgcctttcaggccgccgcgttttcaattgttaatttggaaacggaaaaagtagccggccgggcgggggaggccgcggggaggtaatcggagccgcagcaccgccccggcccctcccgctctcggggcctggcattggcaaagccccgcccctcccagggacgcaagagccccgcccaccattccccgcccccggcatgccccgcccatttccgtaagccccgccctcgccgaggcgggctgggggcacctgggagtgccgagcagtggcgcccctgctgaggagaaggagcccgggcgggggaagggggccgagggctgtgctgggggaggagtcccccaggagccctccccgcaggaacccgtacctctcccgagaagtcgcgcagggtgtctgcttcccttgtccctacgtgaacccaagcctttctgcaacccctctgtaggttcacccaggggagacccctgcctccagactgccggaccagggatcattggtcccattagaaagacgaagaaactgagtcctgagagggacagttaacttgctaaaagtcacacagccaaggcagagcagagctgaattcaagcccattcttttgactgagatacatttagggactgtctgcctcatttagaagaggagggggcatcaggaccagagatacaatttgtccccttccccctatctccagcacggtttctgtggttagtaagttactggaagttctgcttatcattattcaattatgggagggttttggaggtagaaggaggtccctctaaactttccatgtaaatgaaatgtaaaagaccctcttctggggactcccagaacacagaagtccctgaggactggcagcttcaggagccgtccacggccttgcttcccattagggaagctggaattgccagtcccagatggatcagcaaaaaatagggccctcagagactcccacccaatcccttcctcccactgaggaataagctgagactcagacacagtttcccaagtcttcagctgactggtggcggagtcaggagacagaacccaccgacccagctttctagctgtgtccacgcccttctgcttctccctctgctgccccccaatcctgacacctctctcacagccaccactcaggatcctgcctccatcagctgggcctgcaggctgggcagcctttctctttacaggcggaggaaactaagaagagtatctgcagatgtcctcccagcttccagttaaagaccctcccaaccacccttccaccttagctgtgggtcaggcccagagaagctgcgctcctggcctcgagtcacacagcaagccttttccagcttgcaaagcccactggattcagtctggctggtcctggatttggggttcccactgggagcatggctctcagggcagctgtaaccagatgccccaggtgtggcctgtgagtttgcatgctgctttgcttattagtaacaaaggcattgaaacccctcttcctcattgtgtccccaaaccacccactgggtggggtcctcaatggctgagtctacagaactcctgggctgggctcagtcttggcacctgagctccccagggaactctgccctccacggtgctcctcttcgaccctgtcagctcttggtgctctctctgccctggaagtactgagaacccagtggcaaggactaactctttcccttgtcttggactcttccctccctctccctcccccaatatagtgcacaggttctgctgactcagaggacagaaggctcctttgaggttaccctgacccctgccaggttcaagtagctgggaaactgggcaatgcttgaacccactgccacaaagtcacatgcagcaggaagggcaggggcaggtcccatcttggccccaggatgagggaatttttgaggtgggagtgagaggcaggtgcctgagtccttctacagacagaggagaaatccaaagaacattgcattaggaatcaggaaatctgggtgccaggcccaactctgtctctgatctactgtatgatcacaggtaagccaggcccctctctgggactcagtttccccatctataaatgagaaggttggttaatctctaagggacctttcagtgcccagatatagccagtatctggtcatatcttgccacttccgcttcccctcatacaagtcaccatcatcagctggtagtggctcatgcctgtaagcccagcactttgggagatggaggcaggagaattgtttgagcccaggagttcgagacgagcccgggcaacatggggagaccctgtctctacaaaaaataaatataaattagtcgggcatggtggcacccacctgtggccccagctactcagggggctgaggctggcggattgtttgagcccaggaggttgaggctgcagtgagccgtgattgcaccactgcactccagcctgggtaacagagtgagaccctgtctcaaaaaaaaaaaaaaaaaaaagtcacacagggtgaagtggcatgtgcctgtagtctcagctactcaggcagctgaggtgggaggatcatttgagcccaggagttctgggctgtggtgagctattccaatcaggtgtccacactaagtttggcataaatatggtgacctcctgggaacagaggaccatcaagttgcctagggaggggtgaactggcccaggtcagaaacggagcaggtcaaaactcccgtgttgaccagtagtgggatcacacctgtgaatagccactacaatccagcctgggcaacataacaagaccccatctcttaaaaataaaaataaacaaaacaaacaaacaaacaaaaagtcactggcatctcttgccaggattatactttccaactcacaatggggcaaacgtcattgctccctcctcccctctcccccaccatagtccgttcactcagcagcctgtgtgatctttttaaacataaggaagattgagctactccctgctcaaactccccatctcactcagagtaaaagccaagatccttaccatagccagtagatggtccgctttccacctcccctgcctctctgccctcaccccccaccactctccccttgctcattccactctgggatcactcctttcctggtagttctggaacacagaaggcacccttctggctcagatgtgttggatttgtttttccctctggaggtgggatgggggttaagggagcatgaggtgggggctctgacctaagcctgccagtctgagctcatgctcagacacagcatgagtaaaggtggggaggggaaaagagcgcgtttgccattgtcagggacagagctatgataatgcagtgccaagtgtcaggttgggtaccggctagtgaagagcaagttggcctggtgggtggggctttccttgcaatcatgctaaggggtttgggcctgggcccacaactcagtggatttcacactttttaaaaaaacagcaaagctttttgttcacatgaaatttttttttttttttaagatggagtcttgctctgtcgcccaggctggagtgcagtggcgcaatctcggctcactgcaggctccgcctcctgggttcacgccattcttctgcctcagcctctggagtagctgggactacaggcgcccaccaccacgcctggctaagtttttgtatttttagtagagatggggtttcaccgtgttagccaggatggtctcgatctcctgacctcgtgatccgcctgcctcagcctcccaaagtgctgggattacaggcgtgagccaccgcgcccggcctcacatgaaatttttacgccaaagccagcatgtaaaactgagccacccgaatctgcacggagctgctcagtggaaccgagggaaggtttccactagccatcttgcttgagtttctcaaatcctggctgcctaaattccaccccatgtttccccttcctttcaatggcatcctgcttgggagggcccacacctccctgtttgagaagtcagctctgtctggccagtcccaacagatggatgcccctgtgtcctctttgttccactctggctcttgtcaacacattgctcagcccactgacctggtgcaacaggtaggcaggctggcacggcagaaggaagcagacagaacaagtcggaaggtttggggctggtgcaggtgggagaggaggaagctattcctcatcaaacaccttgtctagaagacactgcctttcatgtcccgtgggacagaaaccattcaagctggctcaataaaaactggcttctgtactattacatttgggataaagaaaaagaaaaattggcttctggaggtagaggacagatatggtaaggaaagagaattctttagaggcttcaaggcagaaagcacattttggattcatgggatagagagcagggggatgaggttccagcgtagtgcagtctcatggcccatctctctgcacctctgccaactttcctctgtggttcttagttccattcctgcgaaagacaatccgattggctcagcccaacctatgggtgggcccttcttgggtcagtctccagctctccatgaatctgtggcggccaggagagtgctgtggagccaaccgcagggctgtcatgtgtcgctctgcagtctgggcgccacaaaggggccggctgagagggctgaggggtgctggaatccagcctatgcccaggggtggggcagcccaggggaagggatgcctgtgctaatgggtccgtctagaggggtcaagtttttataacttgtcaggctaacgggaatgctttttttctaagccatcctccaagagggggcatttttttcatagtttgttctatgtgctggcggctgctgtccctccagggacagcctcagggaaactcagctgagggccaactctctcctttctaccccactgctggagagtcacaaggcggaagggactttggccattactgagtagtgctccacctacatgttgcagacagggaaactgaggctccatcagggccccattgcaatttctaagccccagcgcaagcctctggcccagagaagcagcagcggcagtggcggcggccctggtgtggggccctgggtcacgtgctcttgctccctttgccatatttagaatcgctggatcaggggaaacttctcctcccagcccctgaggattcttggaaagagcctcgctctgaggcctggcttactgcccctccccttattcccctgcaggagaaagtaagtgcctgctctctctagaagagtctgggggcctccaggctgccccccttgtcaggaagtgcctgtcaagtctagctgaagtcccttcttcggtatcagctccggtttggggtttaaggagcccctttcttccagaaggtgatggtggccatagcttctgccctctagggaccttggctgaatggaggacagactggcctcagggtcctccagctgaggggagacagagccctgcctttgggccctggtctagggggcaaggaaagagtcacgcgctccccaggccagatgcacaaatcacttgagcttgggggttggagaccagcctgggaaaatagcaagaccttgtctctactaaaaatcaaaaaaaattagccaggtgtggtggtcccggctactcaggaggctgaggcaggcagatttcttgagccttggagagtgatgctgcagtgagctatgattgcaccactgcattccaacacaggcaacagagcaagaccctgtctcaaaagaaaagaaatcagggaaactgctggtggctgggcagtccccagacactggcagggctcagtctgggagggacgctggaaagacgagggaaggaaggaggctctggaggaaggagggggcaaggcctggatctgtatttaccttggccttggtggatacttgggggtggggagcggtcctcttctcacacaggctgcttcctactggataatcaagccttaaaaacaaacagcaacaaaaaacctaaataaaaccctgaaatgcatgtgttgagtgcctgtgatgttccaggtctgaagagccatcctcgctgctgaggataatggtcctgtgctcccatgggacccctctccaggcgtggtcttttctcccaccttcctctcccagctccatacctcctccatctcttcagatcccccaccccaccctcctgcccacttctgagagttgggccttgcctcttcccagagcagtccccagtgagtaggggctgtcggcctcctcccttcccacagcctcctcccacctacatgccttcctgtccctgtggaagctggagggatccttcctactccacaccagctcctccctggctctggatcccagcctcccatcttccttggggacttcattccattgactactcactctgtctccccgcatcttcaacttctccttcttgatctcttggctccttccactctggctctctcatcttaaaagaaaagaaaaagattccctataccctgcatccttctccagctacgatctctgatctcttctttgcagtcaaacatcttcaaattgttaaacctacacttactgtctctacctcctcactgcccctcccctttctcactttttctgggcctgttctggtcttcctctccttctgagagaaggctgcccttgccaagggacccagtgaccaatgtgtcaccaaatccagaggacatttttcacgccttatctcacttgacctcttggcagcatttgacactgttgtctactcccgctttgaaacatgttcttcacgtggcctctctgacacttctctcttctgctttccctcccagctctctggctatccctcccagtctgcgtagagggcctctgttcctgctgcaccgctggggctccatcgggtcctcctctaactttgctacaagctctctggactgtctcagctgctcctgtgacctcagtcaccacctctaccctgatgtcccccagatctgcatttccagccgggtctctctcttcatacccatggagtgtttgcccagtgcccatagccctctctctctctcaacatgcccaccacccaacacctgctcctccagtggggtctcccccgtcccatgaaggcactcatggcaccttcatccatccaatgcccaaaccagaaatagagaagttgttctccttcctagttcccgtttccagttaatcaccgagccctacttcctgcggtgttttccaacccatccactcctcttccctgctgccaccaccctgggccaggccacagtcatctgtcgtctgagctattgtggagctttcttggtctttctgctgagtcttatctcctttgatctattctgtgtacttccccaagtggtcctgagatgcaaattggactgtgtcatttcctctcttagaactccacaattggccaggtgcggtggctcacgcctgtaatcccagcactttgggaggccgaggcaggtggatcacttgaggtcaggagttcaagaccagcctggccaacatggtgaaaccccgtctctactaaaaatacaaaacttagccgggcgtggtggtaggcacctgtaatcccagctactcgggaggctgaggcacgagaatctcttgaacccaggaggcggaggttgcagtgagccaacaccactgcactccagcctgggcgacagagtgagactccgtctcaaaaaaaaaaagaactctacaatgactccccattgcctttgggatcatgttcacagtgcctgagaatgctactcaaggcccctgggtctggccctctctggtttttccactgcccccttcactttaggccacaccatccagaactgctggccgttctgggctgcctcgacggccacattcccactgcttgcacatcctgcttcctctgcctggggcaccccgacccctgtccagttacctcctccaagaagtcttcactgatccctccactttggttgtgcggaaggcttcttgggactctccccgaccccttgagtacactgtcatggcctcgtccatcccgtcaccactgtgtcatgttctgtgttgttaattccttgggacctggattattcatttctggttttacaataaacctggctgagtgtaggtgtctgaagtgaatatagcccagagaggtcaggtgacaacctcttttctgctgtgagatgccctgccatctttcctacccccatcatatccccatctctctggcctggcctcccagcagctgtccctccagggacatgttggacatgtcgagagagagagccgtggacactgggcaaacgcccagtgggtatgaagagagagacctcagctggatccagggacatccccagagaatctggagctgagctgatggccgatcctctccaccccactgctggagagttaccaagctacagggaccttaaccatcactgagttgtccccgacctttgtgtgtgtttctgacagggaaattgaggcccagagcattagtagggcccggtggtccaggtggtcttgggctcaggtcctgcgcttatgactttgaacaagtcatacctttcttttctcatttgaataacagctttattgagatataattcacatacagtaaaattcctccttttaaagtgttcagttcagaggattttagtgtattcacagagctctgcagtcaccacagtatacgcctctgaaccgccctctccttatcagggtgatgatggtacggttccatggggtcactgtgagaactcattaagaacatgcatttagagggcttggcacagtgtctggccaataggaagcctttggccagcaggagcagttatggttattacttcaggtcaccacatgagagccacctccccagcagagctttccccctcctgccctgtggccgcttctggacagtgacttgaggaggtataaatgtggagaaggcggtgattgcagttgtttaaaagccctgagctggctaataattgagtcagctgcaactgctcccatcacctaagccagtgattctcaaagtgtggtccccataacagcagcaatagtatcaccagggacctttgtagaaaggcatattttccacttcaaacttactgaatcagacactgtaggaataggtcccagaaatcagtattttaacaagccctccaggtgactctgacacccaccgtagtttgaaaaccacaaatctaagcaaaccattcactttttcatctctaatcctcttgctccctcctgaacgagtgggatagtcatgggatggggagatgggggaaatggagaggaaaggttggataagccttgtgatcagaccagctggggagagccagccaggcaacacccgcctgtctcattctgcctcctgggctgggcagggagaaagaacatgggccacaacttgcaggcagacatgatgggcaaagatgtcctagaaagtggccgctagtctggcctgtctgctggggagattagagagggcccaggccagccagcacccatgtttcatctatatttgtatagatggagaaactgaggtcccagagggggccagagagaatccttagaaagtcctttgttggatgaatgaagccacaccctagttgtggcaggcatgagaccccagctaaggggctccttcaccttgtctcctctacccctgacctccagatactgatctctcttctgctgtccctgtgtgaggaccacccccactccaggaaggccaaggcagcttgagggtcagcctgagctggggttctagctgcagctctgccactgattcactgtgtgatcctgaacaagtctatccctccctgagctctatttcctcagctggaagatatggataattattcaggtgcctggaacacaggatcttttctttttttgagatacagagtctggctctgtcccccaagctagaatgcagtggcgagatcacagctcactgtagcctcaacctccctggctcaagcgatcttcccacctcagcctcccgagtagctgggaccacagatgcacacccccatgcctggctaatttttgttttgattttttttgtagagacagcatctcacaatgttgcccaggctggtcttgacctcctggactcaagcaatcctcccaccttggactcccaaatgttgggattacaggcatgagccaccgcgcctcgtcccaggatgttttctattagtccaagtatatcccttcaaatgtaatgagagtatcaagggtatagaaactcttagccagtgggttaaagcagggagaagtgaagtttgggggctttttaagcagcgtccgccaaatggagatggtcaaggtcagaggcgttactttttaggaaagacatggggcagccagaggagtcagggatggatgtgctttggggacctcttcagtgggtacaaactggaggctttggcttggtaacatggtgttttgatgtttggttacagtgaactcctgctattcatttacttagtctttcaatagtgctgtgaaatcaatcaagcaatcggtcagtcagaataaggggcaagagagtggagatgaggccattctttcagagaggggatggctggggaggcccctccaaagaagtggcattggaacagacctgggtgaggcagaggaaacagtaaagcaggttcaaagcctggaggtggaaatatgttaggtgtgttccaggactggcaaggaggccagaataagtggggtgcagtgagccagcaggagagtgaagaaggtcaagtttggaggcgggggtggaggcacagaccttgcagggccttgttgtcagtgccgaggagttggactttccctctctaagtgcgatggaagtccgacgagagttttgtggagagcgatggtttccagctgtgcattgtgggaagatgaccctggctgcgttgaagggagtggtcacattcaggcacagtggaggcagggaggccaggtaggtgccagatggtggcggcttggttgggatggtgcgacctggcctgcccagggatagattctgaaggtagagccaatggaatttgctcagaaggggatgtgcagggggagggaaaggaagaatgaaggagcctgagccctgggggagccgtggtgccgttactgagatgggtaggctggaggtgaggaggacttgaggacaaattgagaactggtgtttggaggtgttgggtttgagaggccaccagacatccaagaagagtcattgagcaggcatttggacacacgagctggacacctgggagaggctgccacatcctcactcctgctaaatggcagaggcgactgtggtcaaggggtggggcaggatccaaagtgggcttttcttgtttttgtttttgtttttgtttttgtttttgagacggagtctcactctgtcgcccaggctggagtgcagtggcgcaatcttggctcactgcaagctctgcctcctgggttcatgccattgtcctgcctcagcctcccgagtagctgggactacaggcatccgccagcaagcccagctgatttcttgtatttttaatagagacagggtttcaccgtgttagtcaggatggtctcgatctcctgaccttgtgatctgcccacctcggcctcccaaagtactgggattacaggcgtgagccactgcgcccggccttttttttttttttttttttttttgagatgatgtcttgctcttgttgcccagactggagtgcaatggtgccatcttggctcactgcaacctccgcctcccaagttcaagtgattctcctccctcagcctcctgagtagctgggattacaggcgcctaccaacacgcctggctaacttttgtatttttagtagaggcggggtttcacgatgttggccaggctggtctgtaactcctgacctcaggctatccacccacctcggcctcccaaagtgctgggattacaggcatgagccaccgcacccagcctgcattttaaattttatattagtttgttattaccgaaacaacccatgtttgttccaaacaatatattaggaaatactggctgggcgagtggcttacattgccagctctgggaggcagaggcgggaggatcacttgagcccaggagtttgagaccagcctgggcaacatagttcaaccccatctctacaaaaaatttaaaaattagccgggtgtggtgtcatgtgcctgtggtctcagctactcaggaggctgaggtaggaggatggcttgagctcaggaggtcaaggctacagtgagtcgtgatcatgctactgcactccagcctggttgacagagtgagaccctgtctcaaaaaaaaacaaaacaaaacaaaaaatagaaaatacagataagcagaaagcaaaacaaaagccaaatcacttaattttaccacccatagataagccttgctgactctgggtacgtgtgtaaaaaccatctctgtttcaaacattgggatcacattgccgttaaggttttataatctgctttcctttttttttaaattgtgaagtggaaattttatagatgtgtaattactgacatggcaagaaaagtgttaatgatggccaggcttggtggctcacgcctgtaatcccagcactttgggaggccgaggcaggtggatcacgaggtcaggagatcaagaccatcctggccaacatggtgcaaccccgtctctactaaaaatacaaaaattagctgggcacggtggcatgtgcctgtagccccagctactcgggaggctgaggcagcagaatcgcttgaacccgggaggcggaggttgcagtgagccgagatcacaccactgcacttcagcctggtaacaggatgagactccatctcaaaaaaaaaaaaaagcaaaaggaaaaagaaaagtgttaatgaaacattcaagaagaagtccccagagtggcccactgctgcctgagcttctgaggtcagctgagaaacgggactggagggtgtctgtcaaggccggggtaaagtcttaaaaagtcctggctgtggccattccccgaggagagggctgcatgagataacctcatgaaggacccttctggtcctaaaccctgcttcagctgcagtcccgatgcaggtacatgtggccgctgccttttttgtgattaattattgaacatgaggagctggtgctcttctcttctgttctcccgtaccccgtgtttttgctgactcagctctggtctggaactggccgaggaataagctcttctcgaactcattcactcataacactttaccgacatctgccacctaccttctcaaaccaggggtatttgctgggatacacttgccccccaaaaaggtcaggaacccctgtccaggaggtgtaagtgagccagggcagtgccacgccctttgcatgtcttccttccatagcccccacttcatagataacgagatggctcagagaaggcaggtgacagtctcaaaaccacacacacaagcaggactgggatccaaactcaggtctctctgaccccgagctgctgtccttaaggtcaccacgaaacatgaatataaataaagccacatagaaggtgacttgggccacacatagggaggcaagcatcgggagttggcagttctgaaggggggatagtggggtgcgggaatcagaggctccgtagagctttgtagcatttgtgttcctgtaggcgtggacgatgagcagagtctcgcaggcacagacatgaggtgttctgcgtagcatgcaccgtgccagcaacggtgcagaggtggggagactggggacatctgggaaggctggcgggtcagtacacagagatgtatttccagagaagcctgttccctccggagtctcctccagggtgtgtgcatgttcagcacacccccatcctaaagaggggtgctcctggaggccacctcattcgcctctgctgtgtctgcagcctgtgacctctcacctcgctctccttcacccatccacataccgcaaggccaccagtttctctcctcatgcccttggtcctcttcccatccactgggaggttgggaaccctggctctaatctcagctctgtcctgggcacactgggcgacaaagggtgagtccttcttcctcttcgggcctgtttcctcgtggtgcactgggggatgagggaagtattggatgtgctagggtctaaagttccttccatttctatgtctctggttctgggccactctgtagtttcatgctgtctgcagggaagttcctggcctcgatggcccagctccacactgcccaattcccctccctacatcctctccctgctgcatcattccttctctacctgtcctccatgatcctctttccttttctagctgtctcgttacttaattccacgaaggcaggggcagttgtcccaattctgcagatgaggccaggctcctgccactttggagtgcataagaaagaaggtccctccttcatccgctgaccttccctgagccctgggctgacctctggggcacttctcccaagacatcttaaaaccaagctggggccaaggccaccacttgtggatggctagacctggaggaaccctgagtcagtctatttccactgccagacctgctactcacagatgagtgactacctctctgagctgcagcctgcagcagggggcaattgagatagttgtgaggtccagtagcttggggcttgagggctgctgcctttggtgcccagcacagagctgtaactccagggaattccaattctgatttccacataattttctgaaaataatgttctcctctcttggctctgtaaccccctgccaggggcaccttggctgtcctgtccctccaacaatctaaccctctccctcatgttgtaattgcagatttttgctggtcttcagctgcctggtgctgtctgtgctgtccactatccaggagcaccaggaacttgccaacgagtgtctcctcatcttggtaagtgctgggagtccgggactgaggggggctgtgtgaggtagcacctctgggctgggagtccgggactgaggggggctgtgtgaggtagcacctctgggctgggagtccgggactgaagggggctgtgtgaggtagcacctctgggctgggagtccgggactgaggggggccgtgtgaggtggcacctctgggctgagggctgaaggtggaaagaggcttctcataccatggctcagagagcagcttgctgtgctgtgttccctcagctgtggctgcccctctctgggcatcatctccactttatagcaagtgttgggggacctcctgcctctatgcaagggcttatgatgggtccagaatagaagtgagtaggctccaccccttctcaggacaaaatctgcaaactccacgtgtggtggattttaggtcagtttttgcctaaacacaaaacaccaaatggaagcccctcagagggagacagctgacagccagcaaccccttttgtcaccaggtcagagttagggagtctgagacagctgggacagggagggcctgttgaggagcagaaaaatccgatcagttcatggggaccggaaggggaggacacactagggcttttagtcttcttgcaggaggcggagggggccacctgccctccggaatcgtcaagtccaggaaactccaggagaggggtccgaggaggccctggtccccctaacccagggactcttggctgggtccgcgctgtgacctgggccccagttctggagactgaggaccagaactcaggcccctggtcccacaggaattcgtgatgatcgtggttttcggcttggagtacatcgtccgggtctggtccgccggatgctgctgccgctaccgaggatggcagggtcgcttccgctttgccagaaagcccttctgtgtcatcggtaatgaggcgcgccccgcccgacctgacccctgaccccaggagccagggtgacgcctttactcccaatcccgactctgaccctggagacccgcacagattcagcggaccctccccctccctccccagtcccctgccacatccccagaagtccccgcctccgggtccgtgcgcggggtaggctggctgtgatctcgccgcccccgcccctgcagacttcatcgtgttcgtggcctcggtggccgtcatcgccgcgggtacccagggcaacatcttcgccacgtccgcgctgcgcagcatgcgcttcctgcagatcctgcgcatggtgcgcatggaccgccgcggcggcacctggaagctgctgggctcagtggtctacgcgcatagcaaggtgaggcctgcaagccgcgcgcggagacccgagggcgtgtctggggcacgaccagagcgggcagggcggagagggcgaggtcagaggggctgtctccgtgctgggaaggggtgtggcctgcgggggttggagccctagcaggaggcgaggtctaagcgggtggggcgaagtggattctgaattaggtaggggcgggcctaggagtccggaccggatcagggggcggggccggagaggcggggcttgagggtttcccctggatgcttctgggtttgaagggaccactcgtaccacaaagtgggcagctgaggtgggacttgagggtggggctggagcggggctagggtgggccccaggtggaagcctgaaagtgggacttgggggacggggcaaggtaggccgggtgctggagtcctgagcctggaacctggagactcaaggcaggcggggtgagggtgggggtgggaatgggggtcggggtagggggagtgctggcggtttcgcgaaggccggggcagggtcgccgtgatgggaggagctgagaaagaaaagcgagcctgggactccgggagatgggggacctttatccctttcccgtgtggaagccccccacatctcccaggcaggcacagcgctcctcaccgcgcccctccgcctgccccgcaggagctgatcaccgcctggtacatcgggttcctggtgctcatcttcgcctccttcctggtctacctggctgagaaggacgccaactccgacttctcctcctacgccgactcgctctggtgggggacggtgcgtgagggtctttgtagggctgcccttctccctgggatcctccctgggaacttcccgaggtctgcccatcgtgactcctgactcagggttgagcgggcctgcccctgccctctcactagagctgggacccccctgagaccagccccaatgctaaccccccaacctgctctggtggacctgcctctgtccccagctagccccgcacatcaagaccttgtgactatacccctttcccctgaccagcccaggagagggagaatccatctatgaccctaaccagcccccgtgggtgaccaggggccccttccctcatgatcaggctcctacctgcctgtacccccaacaagccgtaggtggcccccgtgaccagtcctgcctgtaacctgtttgtgtctccagattacattgacaaccatcggctatggtgacaagacaccgcacacatggctgggcagggtcctggctgctggcttcgccttactgggcatctctttctttgccctgcctgccgtgagttgcctcctgctcagttggtgggggaggctgagggtgggacctgctcacccctgtcacacatttgcctggggagcctggggtacctcagaggggcaaggatggggacacccttgcagcctcttactgccccaccactgccagcacattcccccaaccatgccctatccctctagggcatcctaggctccggctttgccctgaaggtccaggagcagcaccggcagaagcacttcgagaagcggaggatgccggcagccaacctcatccaggtacaagatgcccgggaagaagccctaggagcagggccgtgtgactgcactggtgtgtcaaccctgtgtgctgacccatgtccccagcccaactgtgacaccactttgaagctcaaaagggctatgtgactttcctggagccacatgccaagtcacacacagagccaggatgctcactgacagtgccagaaacttccccctgcaccaaatgcctggtttagggctagccagaactgccctattgcccaactccagcccaacttcacagggcctggggaggggcggagcccagacaggagctgggaggcctctggtggagacccactgctgcccccatcagctgtgcagcagtaagcctgccccacttccagcaccttcattcattcattcattccacaagcactcacacaaatgaagagaggatggtgcagacagggcttttaggaatctcaacatttagcaggtgggtgggcctgcaaagttgagctgggcaaggagacagaaggaacagccagaggggtgggtaggaagccaggagtgtgtggtctcagtttccctctgtgccatggcgtgttgtgactgtgtgtgggctgaggccagggctctgattttctgtgaccctgggactaggccttggctttttctagtcaggggtgtgtgtaagggaactccttgcaggaaatgcttcagggaatactggcccagtccacctctgcctgctccctagcctgtcaccctctgagccccaaacccaagcctcactcagcccttccttatctctcctccccagggtagaaccctcctccctgtcgctgttatctccagccaccagctcagccttttcttcttagcgtcccttggggcacaatggccactgtcccctgggagctggccttctgaggggcattgtaggggcaggcggctggcactgtccatgccaagagacagctagtattgtggtgcccataattaatgagacagctctggcagctgctccccagcccatgccaggggcctaggcaagcaggaagtaaaaatattcctgtcttaggagggtgcctggctggtgaggtcagcagtggcagccccttaaggacaagaggcatccaaagaagggaggcgtccagggcccagctctgccttgtcctgcctagcagcctccatgcctccctgctctcactgatggccacactcacagtccctccctggctcttcctacgtggagggagagggacagtctctcctcctgtctgactttcatccctcctgctgcagaggaagctcggcaagcccatggatgctgaggggttggtaggtaatgcttttcctcccctctcagtccttagtattcccatgggcagtgacaggcagctgggaaagatggagtggcattgctagtaataataatgacattctgcaaacatttgcaaagcacccacatgtgccagacactatatttgcactgagaatgcagcggtaacaaagacacagcttgcagtctagggggagagaaagttatcagtcaaatacacaatgaataggtattcatcaaatgtgataaggggaataacaggagtgtttaacagaggaacctggcatgaagtgcctactatataccaggcactgagcttggcatttaatatacaactgttcatttaatcctcacaacaccctggtaggcaagtagtgttacatgcgttttacaggtgaagaaactgaggtcctgaagctttacttaatttgtcctcactaataaggggcagagctgggattggaaacccatgtctgcctgacaacaaaactccagctcttaacctctatgctctatggcccctggctctgacattgatctgctttgtcccctcggggaagtcgtttctccctaggccttactttcttggctgcccctgtcagtggctgtggaattggaactggcctctggctctgggtaacccacaactggaccaaggactgggttctttcaggggagagggctggtggggactgagaggcctcactgatgccccatcccccacgtcccccataccaccaggctgcctggcgcctgtactccaccgatatgagccgggcctacctgacagccacctggtactactatgacagtatcctcccatccttcaggtaggtcctgctgggggtgggggtgggtggggggctggcagcaatgccctttgaggacaagtggctgagactcaaccctggagggtggaaagggggtgatggctcccaggggagcaccctgggctggctctgcagatcctatgtaattcagagcctggagtgtcctttattccactctgctatgcccagggaagaggtggatactggacatagggcattggtgaagccctgccccatggctgaaccccggccctggagtgctggcagtgtgcatgctcacccataggtgatgccatctagggcagtgatacagccagctcgtctcccctcagtcctgaatgggggacagagttagtggatattgcagctggttggagaaagtgtgggatgggcagaaacatgtgttccagacttaggtgcatgctcctaccctgaacccccatgtaggaatatgtgcccacttttactgggccagtcagcagcctcagggcccagaagtgggtctgccccactggcccgggccaggctaagactgcatgggggtggcaccaggagagggattattaatagcatcacaaaggtgcgtgtggccaggtgcctggctaggccctcaggcaggaatgaaaaccatggagcccagctcggtcccacgggcaggcgggcatcaagcttgtggctggggcaggatgctgtgctcagcgcttctgcgggtgccttttttgcctcattagttctccaggagaagctgttgcgcgattccactcgcctctgcacctggcttccccatccctgcgccctcccagccctaggggcttcccaggggagaagcaggagagaaggggccgggaagaggggctcccagcatcacactggtgcccccacatctctccacccggcagaggcaagctcctacctcagagtgggaaggtgactagattagaagagaggccttttgttcaaggctgggcattcgagagtggggcagggctgatttgtaagaaatacaatgtgtatgagggaagatctgggggtgggggtggtcagatggtctaggacctctgcccagaggaacagagcctagtctggagattctggatccactgggcatctgctccctggaccttagtttggtcatccatgcaatgggaaggcaggcaggagagagggaagataccctccttggctcatggcagcagaaaatggcctggagagttaggaagaagccacggtcccgaatctagtcttcaaaaacccagtggcaagagtgagtgctggaggggaaggaagctgggctagccaccctgtcacaccgccctcctcacctccatctccccttaaaatccagagtcagatctggagggaaaggatgtcagggccactgctggcctctctgaggaggcacggcacgttcaggcagtcagcttgatgggctgagagtaagctccttgcacggctgcccttgagctgtgccagccttcacatccatgcttggcatccctgggaactgggggtagaaagggagtggggaaggccagtctcccactgtccaccctgtcctattctggccgggctgtcagtgaacacctctagagcagcaggacctggcaagatctgagctcaggagctctgtgcccactgggtgaggggggtggtgccatggccctgcctgccactgatggtgccctctcctgcagagagctggccctcttgtttgagcacgtgcaacgggcccgcaatgggggcctacggcccctggaggtgcggcgggcgccggtacccgacggagcaccctcccgttacccgcccgttgccacctgccaccggccgggcagcacctccttctgccctggggaaaggtaggggccccgtggggctgccacctcctcttgcttctcctcctcttcttccattctctgtcttcatcctctctcagacctgccttcagccacttcgtgggtgtctgggcctgtttgggggactcctaggccgtcagagggccagacaggtacagactgagggcctctctggaggggtcaggctggactcacctttttgtcctgtggggctctgagggtctgagtgggagagatgtccatgccatcctttcccatcatctcctccgttcatggcattgtcctctttctttctctgttcccacgtcccccttactcctccatccctgcacccccatccctcccgggaagctggacagaggaggaggccactggccacaggtgcttacggctcaggtaatcgtgggcaccatcctggggtgtgagggcagggaaccccctcccccggcatgttgctctaggagggacttagtactgaactcgcctcttgggaacgagatgccagctggaaagagagctctgtgattaagacctctgtaggacctgcgtaaactcagccagtgactaatgttcctttcttgtgcagcccttgtctgcaactttgctaatcccagagggtcctcttggggttctgtttccttccttactgaggtacactttggcgctcccagccatctctttccccttgaactgtctctcctgaagctttttacaaaatcttgaaagaagaacaaagaacaaacaatgcttacccccacataaacgttcctaaagagaagaatttcaggcatgtttggataagggaagcccgtccactcacagcatgggaaagtggctgctcttgtagaggtttagctttgaggtcaggggttaaatccccctcattctttttccctcgtcctttacccatctctttgttttgtctcatcttcacacatcacccctgaaccagccaaatggacatctggcctttgagcttcaatgtcattctgagccccaggcccagaacaaagaataggagaagaggcgagccgcccagtgatcagcaggggaggcgtggtggaagctcgcctctgccacccgatgctgtgtgtcctggaggaagccttcagtcattctgaacctgtgtgtcctggcggaaaatcggcagtgtttaggctgattggggctctgggtactctagagtttctgggctgaaaaggcctagggaggagttttggtgcagaggatgcagggagcagcctcccttccttgttctcagtgagggcacttctgggccaggggctgaacaggaagtgggtggagagggagagtccctccaggtctggggctggagggaggggaagcgtgactgccaggccaggctgagagctccctgggagagtagggcccctctcagattctctgcccgaaggtccctcattgttaccttcatccctaccaaacatagtttccaggcggaaactcaagagtttttgtatcccagcaatcctgtccaggacctgagccagggctctctgtgcttccagttcactctggtctcattttgactgaataggaaggcaaggggaatggacattagcctggggcctagtacctgtacactccccacggctcctttggtccctgacacccccagggcccaggaacagattactactaagggcttggctgtcactgactcccagcctcgtatctatctgcctgggaggggacttggcgagtgtctgggacacagggtgatggtagtaaagtggccctttctcccagggaccccagggggctgagccatggtttgtagatcagtcaccaggctcaggcccaatggccgtatcgttaatcgtggctgtctagaccgccagccaggacacccttcctccaccaaaaacacacacacatatacacactcggttggccacacctctggtggtgcttggggatggacctgggccaagtgtgcccacaggaagtggtgctaaaggagcaggatttcctgggggatggcattgccagggccagcacctctcctcttcagggttttgcaatgagtttatcaaaccatggtctccagacctcctgcatcagcatcccatggagtgtttgttcaaaatgcagatacctggacctgtctccaagcccacaggatcagaatctctggagaagagacacagccttctgcatatgtaacatggtccccaggggatccctatgcaaagtgtgagaacatctacgttctggtgatggggctggaggatgatttaggtgggggtccttctttcccaccagctaccggaggccggccccatcccagcagctccccacactctgcccacagcccctttcccgctaacctctgttcgtgtcttattctcaaacttccagccagatgtttaataataaacggagtttctttcggatccacgccagctggagaccgaggtaccccctcgcctgctcctcctgtccccactcctccttgccccacccaatttgggggctggagaggggacaggatgggccaaggacaaggtgcatgtgcctgccgcctgccgtctgccttgggtgcccagtgaacccctcgcctttctgggatgcctctgctaggtctggggcatgggcccagggtgccaggaggggcacgtgcaggagccttaaggatgtgtgctggctctgctgctgatgccctctgtgatcttggccaaattgcttcccttcttggacctcagttttccgtctgtggaatgggcagattgaactagaggacctctgagggtccttctcactctgacttttgccaggccttgggcttagctttctgtctccctgctacccacctggggacctagcagatgcctgaaggagctgggtttggcacctttgccagctccaggaccccagctcttttagcggcatctccatggcattccttggtacctgccctgtgccaggacttgctctgtgcactagggacacggtgatgaataaaacatcgtcctcggagagttgcaaagagtaattgcagctcagtgtgatgagtgcaacaaagggaggaagcacaggggctgtggagcccgggtcaggcacacaacccagaggaagccctaaaagcagtgggtttcagggagggcattccaggcagtgaagcagcacggacccaagcaaggaggcaagagggagcacagtgtggggaaaaaagctggcagcccagtttggcccccctgagactggacatcagagcgaaggttgggggcagagctgggtcatgcagaacctaaaagcccagtgtgagcttcaccctgttggcatgcttggcagcctgagctcatggagtcctgggtttccaaaggtgcctctggggccctgtgggctggggtcccggagctaggagatgagtggcagggctcctggctgcccatgtgtgcttctgctgagaggtgttttttcctagaaacgtgggttctggaccacaatctagctactacccactattcgtgtgtccttgggcaaatcacctgacccctttgcacctcagtttcctcagatgtaaaatgcagatgtaaatagggtctgcttccactaaaactggacctggctccaataaatattggccttatttgatttggtatgttcagcagttaagatcttatttaccttaaaagaaaatagcttagaaaccatggctgtgggcaatggtttgagctgaagcgttgagctaaggagtctctgggtcaggcccgccattttgcaagcctcctttggctgtggagggtgtggacaggaaggacacagccatggcagaggccagtggcgaggctgtttccatagtccctgaagaggggctgtatgtggcttcagaagtcgtaggctgcctctgttcccccagtgagagtggccctgggagggcagatcatgaggccctaaagaaagtccttgtggaagtgagttcaaggggttgggaccagcagggcagcctgggcagagctcggcctccccagcagggcagccacagtccagcccaccccatctttctcccaggtaccaacagatccttagccagagtttcttgaccttggcatcattgacattagataattctttgtggattgcgactatcacatgcatggtaggatgtggaacagcacccttggcctctacctactagatgtctacctactagacattgccacatgtcccctgagtgggggaacttgctccagttgagaaccactgctctacaccctatcctgattgcttgacccagaaaaagaacatagactctgaagtcagagaaggctgggttccagttcttgctccatctcataggagctctgtgaccttggccaaatcatctcacctctttccgtgtatataaaatagggatggtaaagaccgcccaccacacacagtggctgagagaactgaaagaactaaggcagcctgatgggaccctgcacgttctgggagcctgggaggggaaagagctttttggtgcccactgtgtgccaggttttcttccaccttcttttagctttcagacttagaggagctgatatgagccattttctgggccctgcccaaggaactggaatccagacccactcctgggaaaacagtgccttcttgcattaaaaaggagctcagggcctctggctggctggaaacttacagaaccccacaaaccagactggaagcttcctcaaccatcacagaatcagagctggaaagggacctttcaaggtctctagtgcaagccctcgaactccttcctccataagtcctgctgagtgcaagctcagccttgcttgcattacttcttttgacagggaggttgccctcttctccagaacgccattggagccttatgtggtgggcgcagtgatgtggagttccaggcccttggccaaagtgtcagggccttctccactctcctctcttcctctccctcttggaggagtggaggacaggagaaggggttgcacggaccgggcagggtggagggtgcttgccagcatgagggagcctgcaggaatggctctgcagaggaaagtttgggagagccaacctcaaactttgattggaatctttgggatgtgtcgatggagtcctgggccagtggagagcatgctggatagtgggaactgggaactgtccctgtccttttgataccctcagggcccccatccttgacctattaacctctcccctctgggcagaggccgccacccctaaggatggccctacatcctggccaccttcctgaaggtgcccctggtttcgaggtctccctcacttcagcaccttggctccctcccctccaccccatgccctgggcatgggagaccccagttcccacccaataccgaaaccagaatctcttctctgctcaacccttgatctgaaagcctctgagagtaggtgacacggtgtcctcccccaactcctgccccacttcaggtctcctctaaggctggctggtactctcttgatctggggccccagacatttggggtgggtccccctgaacccgaacctgaacctgtcggaatctctagtggcaaaccacagcaggggaggcagcgatgacgtcacagggcatgggatggaggacatttgcataggtcctaccccaacagccataacattgtccttgaacctcttggacacagagttactctaccagatcatggttaaccagggcttgtcctggggaatgaggcctctgctaacttgttttcctccaacgtttggggaacgtggtggggagttggatgcgggaagggaagtctgagtgcatgtgtagacgtgcacgtacacgttcacatgcacacagactgtgtaaatgctgttgaaccgggagctcagtaggcagtatcggggggtagatctttagcggggatccaagaccacacaggcaggatgtcaatcaaggtgggctgaacttaggtaggagagaccacagaagaacatgttatcaaatagagaccctcactgagagggcaggcaccaggcatggcctgggcatacatgtgggcccagcagctagaaccatggggccgaggccctcagtaggccatcacgctgcacacctccagggcaccactgcatggaagtctgtgtgatggagtccttattttgcagtgcactgcctgcacagctgtacgaggccctaaaaccctgaccagtgtgggatcagatagccgcagcagtggggagtggaggaaaatatgaaatgacacatgtaaacacacgccaacatatgtacacacaccagtgcctgtacacccacactcgcacatgtgtgtgcacaaggtgtgtgtgtgcatgcgcgcacacacacacaccctcgactccacacagcctgcccctgtgtacagtgaggactggaggcctacctccgtgtgcatggccaggtgagcttccgaccctcagcagcctgtctgtgcccaaaggggtcgccacccccaccctctgcccactcacctgcgccaggcccagctcccacatcctcctgtctgtgtctctgactttggatttctcccactccttccactctgacatctgtctcctgtgcaccccttatctgtccgggtgatgaggggtgggatgtgggtggtggggagaggatctgcttcgactgaccccgaatcagcctcttgtaggagtgagggcctcccttaccacatccttgttccatcccaagaagtctccgcttggcggggaatccagacctaatagccacccccaagtcctaagtcagctttgtccccactcacccccacccccagctctggctaacttggctctctcccaacctgcctgccctgccagcagccggatgggcatcaaagaccgcatccgcatgggcagctcccagcggcggacgggtccttccaagcagcatctggcacctccaacaatgcccacctccccaagcagcgagcaggtgggtgaggccaccagccccaccaaggtgcaaaagagctggagcttcaatgaccgcacccgcttccgggcatctctgagactcaaaccccgcacctctgctgagggtaagcccccggggggctgagtccgatcgagggccggctgagggtggcagggcggggacagtctgggctgggagcagaaagatctggctcgcgtctcagctctggaactgatggaccgtctttgggctctggtcttctcatctgtaaaatgggcattataatatttgctctgctatacaatggacatcagactgtttgggaatcacgtggagggtggcatttcataggggttagcagcacaggctttggagcgagactgcctggatttgcatcctggctttgtcacttatcttaggcgagtgacctaatttctctgggcctcattctcctcattcataaaatgggaacaataatagcatccacttcctaggattattgtgaggattaaatgagataatccatggaaggtgaacagaagacttttgggaatataggaggtgctcaacaaatagctaaacacaaatgtactttggaagcggcaggaatgcatccttgatgagccctgactatgcactgcccagcactggcttatctcatttacttctcccagtgaccctggaaagtaggttctgtttttgtccccactttacagacgtgggcactgagatctctcagcttgtgagtggcagaggtgctctcctcaagcaggtctattcagctccaaagcccaggccttcttcctacccctcttcacccagcccaggctgcaagtatgagactgtggaccatgctgatgtcacttttctgagttttggctctgctggagacttccactgtgatttaggcaggagactgcccctttccatgcctcagtgtcctcttcaggaaaatgagagggttggaccaagccccctggaagacttctcccagctttgacatactttaggcccctgggtggggagaggtggggtgagtgcacaaggatgggggatggggacagctccccctttggccttggagggaggggacccagccatgctgtttctgcctgtgctgtgtcagccctcaagatgctgctggctgacacctcagagtttacagaaccccatagaccagtctttgagaggtgctgcccatagaagcctgggcacagctggtgcccaggacctcccttccctgtcctggaagctgtccgggctcttgccactgctcctgtgaggcaaggacagcatcacctctctgcgcaacacagggcactagcctcagagaagcttctctcattcagggaagaatggtttgttttaagggccttccctagtagcagagctgggcctgggagccagccacttgggtgtccttccatcttagctgaaggagaagactgtgtgcatgattacatgcagtgccatcaaaccccttatctctggggctcactgttctgcaaggtggaaccagtggggcttcctccagggctttgtgcaacaaacttgccctggactaggccagctgtgccctaaagcagctcccacctacccaccaggcagatgtttaccctgactggccaccggggcagatgggcatgcaacacactggggctttccaccctggggagggcagtgagacacaggagccccaagaaggttctgagccctttctgggcctctgtcttcctattggacactctactggtggtttggcatacaagggtcggatgggaggttgggagtggcccctttggtgggccacttgccccatacctgccttttcagatgccccctcagaggaagtagcagaggagaagagctaccagtgtgagctcacggtggacgacatcatgcctgctgtgaagacagtcatccgctccatcaggtaagactgaggcctgaggcgagcacccccctccgtgtgccacccactgctgctccccatctgggcgggtggatcacttgaggtcaggagtttgagaccagcctggccaacatggtgaaaccccgtctctactaaaaatacaaaaaattagccagacgtggtggtggatgcctgtaatcccagctacttgggaggctgaggcaggagaatcacttgaacctgggaggcagaggttgcattaagccaagatagtgccattgcactccagcctgagcaacaagagtgaaactgtataaaaaaaaaaaatgtattttttatggtgggtcttggtcaaaaaagtttgaaagcccctgctctactggctgtctccatgcctcaaaaattaagcagggaccagggtctcctaggccacggcctaggcatggatctggcctccaagctccttggtgtgccgtcctggcctagtctccatctccagcctgcagctctagctccagaaaccccctcaacctccaagttttctgggctccccactttcttccctggctgatacacctgcccacaagcctcttttcttgtattccttttaaaattagagtcaggctgggcgtggtggctcatgcctgtaatcccaccactttgggaggctgaggcaagagaatcacttgaggtcagaagttcgagaccagcctgggcagcatagtgaaatcttgtctttgcaaaaaaaaaaaaaaaaaattaaaaaattagccaggcatgttggtgtgcccctgtagttccagctacttgggaggccaaggtggaaggatggcttgagtgcaggagtttgaggctgtagtgagccgtgattgagctactgcactccagcctgggtgacagagtgacaccttgtctctaaatagataaatagataaaatcagagtcagctggacctgtccccactaccccccacagtctgaagcctctgcttacccccttttcacccatccattctctcccctccatgtgcccagtgtcaaggacatagtacctgacctgccacctgacccaagccagctctcctgggccaccccaccgacctctcagccagcatgccccaaacctgctcctcttcctgggctggttcccatttcaggcagtggcaccaccatccacttggtcacccaagccatgggagtcatcctggactcagaccagggagactttcagccccacctcctgaactgctccaagctcttccatatctcctcccccatcccctaaagctagtttccctgcccacgcctctgcccctccagggtattctccacacaggctggcagagctggcatgctaaagcagagtaactgagccgggaacagtgggtcacacctgtagtcccagcactttgggaggctgagacgggcagatcgcttgagtccaggagttcgagaccagcctgggcagcatagtgggacccccatctctttaaaaaataaaaattaaaaaaaaaaaaaacagagttattgatgtgcctgccccacaatgtcccattgcccagtctctgccagagatgcagggctcttcaaagcacaccccagcctccttctcgaggctgatctcctgtcttctcataccatggcaccctgaaccccatcctccaccccggctggttgattaacccctttccatctcatccctgtttctgctacttggaggtaggggaggctgggagacgcagcagaggctgttcatggtggccaagcaggaggtgccctggtgctggacaaggggatagcaaagagatggagagggtgctgggaaagaatccctgctctaacaggacactccctctgagccccctcccccaacaggattctcaagttcctggtggccaaaaggaaattcaaggagacactgcgaccgtacgacgtgaaggacgtcattgagcagtactcagcaggccacctggacatgctgggccggatcaagagcctgcaaactcggtgggtgcaccgggcctgttgggaggcaggggcagggaggcagcgaccccagccctgaatgaagtctgaggccaacccccgagcacccccaagggctcactgctgcagctgagtttctagactgaggaggtccctggcttgcagtgccagcctgaggccagacccagcacccgtcccaaggctgagaaacaacccaaccatagtttctctgtgaggtgggtcctctgtgcaagccctattgactcatatgccttgggggctttgtttagaatgactgtttcctggtcctaaaataatcagcctaaaataatcactgacctcccatctcccaagagaataggcaaattgtcctcactgcccacctcttgcctctggaatcctcccacatctctctggtagacccagcattaggaagaatcctcaccccaagacccacatcacctgcaccttgcccttctcctcttctggcctgcattttcactgtccactcattcatttaatcactcgagaaatagtcagtgggcatttactacttgccagcctgtggggatatggcagaaagcgcagcagagttcccacacttatggagctttcattctagtggaaggagaataagtgataaataagtaaaactggaatatgtcagacaacgataaatactaaggaggaaaataagggtcaggctgttagggtttgcaattttaaataggtgagaaggttctagagggaacagcaagtgccaaggacttgagaggggcaagtggctggagtgttggcttcagcacagcagggagcctggtgtggctgcactggagtgagaggtaggaggtgaggtcagagggctaacggcactcagagagtgtaaagtcctgtaggcccctgcaaagacgttggtgttcatccaggatgagctgcaagcattggagggttttgtgcaaacgactgacaagatctgaattgtcttttaaaaggatcaccctgggtgctgtgttgaggatggacttagcggagtgagggtggacacaggtagaccaatgagaacctgcttcagacttccacgcatgagaccgtggggacttggaacagagtggcagctgcagaggtgggacaagtggtcagattctagatacattttgtaggcaaagttgacagggttttctgatggggtgttaagagaaagaagagagtcaaggatgaagctaaggtttttggcttcagcaagaggaaaaatcgagttgccatttgttgacatggagaaggcaatgaatggagcaagtttcggtcaggagatttgggaggtgccgggtttgtgatgcctatctgacattcaagtggagtgttgatctggcagttgaatagagaagtgtggagtgcagagcagaagtacaggatggagatgaagatttggtgtcgaaagtgtagaggaattgaaaattatggatctgaagacatcaactagtgagtggagtaaatagagaatagaggtcccaagagtgagccttggatcctgcagtgtttccaggttgcagagatagaggaggaactaacaaaggagactgtaaaggagaggtcagggaagtaggaaaagaactgggagagggtggtgtttcaaatgaagaaagggtttgctggaagaaggggtgatcagatgtgttgagtgctgctagtaagtcaagtaaaatgaggacaggagttgatcaatggatttagcaacatggggttatttgggagcttgacaacagtagttttggtgaaatggcaggggtgaaagcctgactggagtaggtttaagagagaaggggaggaaaggaattggaggtagaggatagagataacactttcaagaattttgctgcaaaggagagcagaaaaataaggtgaggtcagttctagccttgtccacccaccttaaaagtcacattcccacgtgtctccactcctcccatcctctttccccttttccccaatccatcttttcttttcttttcttttcttttttttttttttgagacagtatcttgctctgtcgcccaggctggagtgcagtggtgcaatcacagcgcactgcagcctcgacctctccggctcaagtgatcttcctgcctcagcctcctaagtagctgggaccacaggcatgagctaccatgtccagctaatttttaaaaaattatttttgtagagaggagggcttgctatgttgccaagtctgtctcgaattcctgggctcaagtgatacctccctacctagcctccccaaatgctgggattataggcatgcgccactgcgctgggcctcctagtccactatttccattcctctttcaccagacggttgttttacttgtcaggttcgtgtgtggtgcctttgcttggccagtggagaaccaccagagcaggggccagtccctccaccctcaactcagcctccatctggcagggcaatggccccttccctcagattgcctgtcccctcgtggtgccttctccttcatcaggcaacctataattcttgtggaagggagggacggcgtgtccccgggccctctgatggttcccttacccttagggtggaccaaattgtgggtcgggggcccggggacaggaaggcccgggagaagggcgacaaggggccctccgacgcggaggtggtggatgaaatcagcatgatgggacgcgtggtcaaggtggagaagcaggtgagtgtaggatggggtggcggagctggccataccaagaagctctgggggccgcggtgacatggggaggatgcgtttcccacagccacagcccaagggtccccgagaagacctaagagccccctccccggccgaagcccccgccctcgccgccagacattcccataaacccgccctctcctgctaagccccgcccccaggctgcataagcccgcccataaccttcagataagcctacctcagttccccctactccatttgaccccgcctctcagttgtcgctgtagctcgcggactatccccatcggtcacacctaaccaccccccgggttatgcaccagtgcccagcttcgcccctcgctctagccaagctccacctttccaggcgggatttgtgcttcccagataagccccgcccactccaccggctagggtccgccccgagacccaagccccgcccccggccgcgtcccctccggtcccaggccctgcttcccagctgcgccccgtccccaggtgcagtccatcgagcacaagctggacctgctgttgggcttctattcgcgctgcctgcgctctggcacctcggccagcctgggcgccgtgcaagtgccgctgttcgaccccgacatcacctccgactaccacagccctgtggaccacgaggacatctccgtctccgcacagacgctcagcatctcccgctcggtcagcaccaacatggactgagggacttctcagaggcagggcagcacacggccagccccgcggcctggcgctccgactgccctctgaggcctccggactcctctcgtacttgaactcactccctcacggggagagagaccacacgcagtattgagctgcctgagtgggcgtggtacctgctgtgggtgccagcgccccttccccacctcaggagcgtgagatgccaggtcgcacagagggcagcagcagcggccgtcccgcggcctctgggccccccagtgccctgcccactccatcaaggccctatgtggcccacctggcaggggcacagccccgggagtgggagcgggcgctggggccctgggccctgacccagcttccagctatgcaaggtgaggtctctggcccacccttcggacacagcagggaagccctcccgccaagtccccgccccacttgggggtgggccaaggtgcccccacaggtacccacaaagcacaggaccctgccacaaggcaggtggacaccatatatgcaaaccatgttaaatatgcaactttggggacccccatggggtctctctgtccctcccccattgggagctgggcccccagcagtagctggtctcaggctgcttggccaccaccctgtccctattctttggcttatcactccttcccctcccagcatggggcctgtttctcccctgccctctcctaagggcaatgcctgggcctttcttcccatttgcaagtgtcagctcccaggggctccctcctcctgctgggtggccactcccctccttggccctccagacaccactcatagtcagcacaggtttctgtatcctccccaaaactcccagacagtgcttcgtggacgatcgcacaaacatagccttttagtttctccagacaggaagaaagcctctcacacttaaacatgcaatgacgtgacacacttggagacatgagtgcagagccactcagccgctcctgggcctctgcagcagatgccagtggactggccttgcagggtgacgaccactaagaggaagacccccaactccatctgagcaggagaaggagctttgaagtaacccgagagctctccaggccccacccagacctttacccgctccccttcttcaagaagatctcctcctctctggtccaggagccctaacccactgcctctgcctgtccccaagggcccgcctccgtgtctccacagcacaactcgggcccaggcctgacaccactggagagaccccaggcccacttctagccaggcctgtgccttcctagtcactctaactcccagagagaataagaatgcatgtaatagctataccaaccgcgcatccggctttcacatgcactgtctcccctccctccacaccccacttcttcacttcaattggcagcgccacatccaggcgtcagcccccattcactccaggaacactttcttatccccacccctttgctcctcttctgcaaagccaatgcaggtggcaggaaggtgaggggtagtggaccaatggcaaccctctgtgggaacaaggggccgaggccacgctgcctgcatctcgtgctggggacctgcatgcgccagcaccagggcttggactggatcttactcagtccatggtgcccagcctctgccccaacatgccctctgcatgtgaccgtcatgccctggatggagccactcctggctcaccccacctgcactgcactgtccccagagagccacccctccacccactcagagacagctgtggagagggccaggagaatgggattaccctatgaccaaggagacatgggaagaagccctccttccttccacgatcgaggttccgccatcaactcggttctcggatatgcaagtacctcactttgttaacttattaacttattggtttcattaaagttttcaagaggaggtgattgttcttggttttgttcagtggctgtgaggtgaggctcctggtttgggggtggggacaaggagatttggattggtcgggactctttgttgtatacaacaaaaacccaaccctgtatggtttaaacagacaaacaaaaagaaacttattggcacagagaactgagaagtccaggggatagatttggtttcatgcacagtgagatctagatgcttaaacgtgtcaggactcttgtttcctgtaagccttcctttctggcaggctgacctctcatggtgaccagtaaaattggccaccactttcctaatagtttgcatcagtcaagatcaagtcaggaaggcagaaacaacactaagtttttcagcaaaagaatttattataggtaatgggttacactgatgcaggagggctgaaagaacaaaagagaattttctctaggtgattctgagatagcctagagaaaataactgcagaaagcagttaccactcccagagctgcaagagtataggaaacaggttggggttatcagaacccacaagcttgcggagagggagcccggtagtgttggggctcagagatctgaaaaggaggtactccctggctggtgctagtacctcttaggggacacaatgaggcttgtctgggagtatgggaaaaaagccgaagtctgggatcaactgttgcaacctggctgttgctgataaggataggaagcaaaggaagagagaagtctccacttttcttgccttccagtcttcccctagtaccccttattgtcaaagctagcgaacaaaggagtgatgtggtttgcagagtcccagccccagtatcacagagttagaaggctgcacttggaactgaaagacaataacatgggcacgggccacccctttggacacacagtttccacaaacatcaatccatacatacttgaaccgccatataacgacagtagcttccacctagtaagatgaaactgtcctttatacaaatgaagacactctagtcccctccccctaaatgggaaaaacacaacgtcccacggttcaacagatgcatccatctccaggggttagtcactgaatccatatttgggttaagtattcctctaattcaggcacaattccacctacaactaaacactaaagtaaagttgatcatcacatacaatgtttatataaaatatgggagaaaggaggagggaggaaaaaataatatgtacagtgcacacacacacatgcacacacatcccaagcaaggaaggaagtacgcatagccgcaatcgacctctttctggtatctctggtcacagtgccatggttggtatgaataatttccttattccattgcccttccatgtttcctttgccctcagccaacacctcagctttttagggacctttttttttttttttttttgagacagagtctcgcttggttgccaggctggaatgtagcggtgcgatctcagctcactgcaacttccacctcctgggttcaagcgattctcctgccttagcctcccaagtagctgggactacaggcatgtgccaccacacccagctaatttttgtatttttagtagagatggggtttcaccatgttggccaggatggtcttgatctcctgatctcgtgatccacctgccttgtcctcccaaagtgctgggattacaggcgtgagccaccgtgcctggccagggatctttatatggtggagtgacccagataatcattcctgaagggtctgaatcctcagcggtcctgcatgggtgggtgtcacagcttttcattgacttttgctatcatacatggaagtacttattatagaaaggccttagagaatcccttgggttccagacttagtcctccttgccctgttgtgtggcagcaaccaatttccgctcggtaatgaagatcagtcatgcagccagtgtattaactctttatttttcctgctggttgagtggcatgaggagcccacaatggcctggtt

SEQ ID NO: 6 - DNA, 4324 bp, Homo sapiens
  source 1..4324: mol_type = other DNA
gacatgtgagcggcgcgcgccggtggcaggtggaaaggcgagcggcatggagcgcgtaataagagagttggagtcggaaagagcagccccagtcgccggggaagcgggaggtcagtgcgggctccggcggcccccaggctccgagcgcccgcccgcggccccggcccggcccctagcccccgccgcccgcgcccgccccgggtcgcccctctggccccgggtccgagccatgcgtctctgagcgccccgagcgcgcccccgccccggaccgtgcccgggccccggcgcccccagcccggcgccgcccatggccgaggcccccccgcgccgcctcggcctgggtcccccgcccggggacgccccccgcgcggagctagtggcgctcacggccgtgcagagcgaacagggcgaggcgggcgggggcggctccccgcgccgcctcggcctcctgggcagccccctgccgccgggcgcgcccctccctgggccgggctccggctcgggctccgcctgcggccagcgctcctcggccgcgcacaagcgctaccgccgcctgcagaactgggtctacaacgtgctggagcggccccgcggctgggccttcgtctaccacgtcttcatatttttgctggtcttcagctgcctggtgctgtctgtgctgtccactatccaggagcaccaggaacttgccaacgagtgtctcctcatcttggaattcgtgatgatcgtggttttcggcttggagtacatcgtccgggtctggtccgccggatgctgctgccgctaccgaggatggcagggtcgcttccgctttgccagaaagcccttctgtgtcatcgacttcatcgtgttcgtggcctcggtggccgtcatcgccgcgggtacccagggcaacatcttcgccacgtccgcgctgcgcagcatgcgcttcctgcagatcctgcgcatggtgcgcatggaccgccgcggcggcacctggaagctgctgggctcagtggtctacgcgcatagcaaggagctgatcaccgcctggtacatcgggttcctggtgctcatcttcgcctccttcctggtctacctggctgagaaggacgccaactccgacttctcctcctacgccgactcgctctggtgggggacgattacattgacaaccatcggctatggtgacaagacaccgcacacatggctgggcagggtcctggctgctggcttcgccttactgggcatctctttctttgccctgcctgccggcatcctaggctccggctttgccctgaaggtccaggagcagcaccggcagaagcacttcgagaagcggaggatgccggcagccaacctcatccaggctgcctggcgcctgtactccaccgatatgagccgggcctacctgacagccacctggtactactatgacagtatcctcccatccttcagagagctggccctcttgtttgagcacgtgcaacgggcccgcaatgggggcctacggcccctggaggtgcggcgggcgccggtacccgacggagcaccctcccgttacccgcccgttgccacctgccaccggccgggcagcacctccttctgccctggggaaagcagccggatgggcatcaaagaccgcatccgcatgggcagctcccagcggcggacgggtccttccaagcagcatctggcacctccaacaatgcccacctccccaagcagcgagcaggtgggtgaggccaccagccccaccaaggtgcaaaagagctggagcttcaatgaccgcacccgcttccgggcatctctgagactcaaaccccgcacctctgctgaggatgccccctcagaggaagtagcagaggagaagagctaccagtgtgagctcacggtggacgacatcatgcctgctgtgaagacagtcatccgctccatcaggattctcaagttcctggtggccaaaaggaaattcaaggagacactgcgaccgtacgacgtgaaggacgtcattgagcagtactcagcaggccacctggacatgctgggccggatcaagagcctgcaaactcgggtggaccaaattgtgggtcgggggcccggggacaggaaggcccgggagaagggcgacaaggggccctccgacgcggaggtggtggatgaaatcagcatgatgggacgcgtggtcaaggtggagaagcaggtgcagtccatcgagcacaagctggacctgctgttgggcttctattcgcgctgcctgcgctctggcacctcggccagcctgggcgccgtgcaagtgccgctgttcgaccccgacatcacctccgactaccacagccctgtggaccacgaggacatctccgtctccgcacagacgctcagcatctcccgctcggtcagcaccaacatggactgagggacttctcagaggcagggcagcacacggccagccccgcggcctggcgctccgactgccctctgaggcctccggactcctctcgtacttgaactcactccctcacggggagagagaccacacgcagtattgagctgcctgagtgggcgtggtacctgctgtgggtgccagcgccccttccccacctcaggagcgtgagatgccaggtcgcacagagggcagcagcagcggccgtcccgcggcctctgggccccccagtgccctgcccactccatcaaggccctatgtggcccacctggcaggggcacagccccgggagtgggagcgggcgctggggccctgggccctgacccagcttccagctatgcaaggtgaggtctctggcccacccttcggacacagcagggaagccctcccgccaagtccccgccccacttgggggtgggccaaggtgcccccacaggtacccacaaagcacaggaccctgccacaaggcaggtggacaccatatatgcaaaccatgttaaatatgcaactttggggacccccatggggtctctctgtccctcccccattgggagctgggcccccagcagtagctggtctcaggctgcttggccaccaccctgtccctattctttggcttatcactccttcccctcccagcatggggcctgtttctcccctgccctctcctaagggcaatgcctgggcctttcttcccatttgcaagtgtcagctcccaggggctccctcctcctgctgggtggccactcccctccttggccctccagacaccactcatagtcagcacaggtttctgtatcctccccaaaactcccagacagtgcttcgtggacgatcgcacaaacatagccttttagtttctccagacaggaagaaagcctctcacacttaaacatgcaatgacgtgacacacttggagacatgagtgcagagccactcagccgctcctgggcctctgcagcagatgccagtggactggccttgcagggtgacgaccactaagaggaagacccccaactccatctgagcaggagaaggagctttgaagtaacccgagagctctccaggccccacccagacctttacccgctccccttcttcaagaagatctcctcctctctggtccaggagccctaacccactgcctctgcctgtccccaagggcccgcctccgtgtctccacagcacaactcgggcccaggcctgacaccactggagagaccccaggcccacttctagccaggcctgtgccttcctagtcactctaactcccagagagaataagaatgcatgtaatagctataccaaccgcgcatccggctttcacatgcactgtctcccctccctccacaccccacttcttcacttcaattggcagcgccacatccaggcgtcagcccccattcactccaggaacactttcttatccccacccctttgctcctcttctgcaaagccaatgcaggtggcaggaaggtgaggggtagtggaccaatggcaaccctctgtgggaacaaggggccgaggccacgctgcctgcatctcgtgctggggacctgcatgcgccagcaccagggcttggactggatcttactcagtccatggtgcccagcctctgccccaacatgccctctgcatgtgaccgtcatgccctggatggagccactcctggctcaccccacctgcactgcactgtccccagagagccacccctccacccactcagagacagctgtggagagggccaggagaatgggattaccctatgaccaaggagacatgggaagaagccctccttccttccacgatcgaggttccgccatcaactcggttctcggatatgcaagtacctcactttgttaacttattaacttattggtttcattaaagttttcaagagga

SEQ ID NO: 7 - DNA, 4162 bp, Homo sapiens
  source 1..4162: mol_type = other DNA
gacatgtgagcggcgcgcgccggtggcaggtggaaaggcgagcggcatggagcgcgtaataagagagttggagtcggaaagagcagccccagtcgccggggaagcgggaggtcagtgcgggctccggcggcccccaggctccgagcgcccgcccgcggccccggcccggcccctagcccccgccgcccgcgcccgccccgggtcgcccctctggccccgggtccgagccatgcgtctctgagcgccccgagcgcgcccccgccccggaccgtgcccgggccccggcgcccccagcccggcgccgcccatggccgaggcccccccgcgccgcctcggcctgggtcccccgcccggggacgccccccgcgcggagctagtggcgctcacggccgtgcagagcgaacagggcgaggcgggcgggggcggctccccgcgccgcctcggcctcctgggcagccccctgccgccgggcgcgcccctccctgggccgggctccggctcgggctccgcctgcggccagcgctcctcggccgcgcacaagcgctaccgccgcctgcagaactgggtctacaacgtgctggagcggccccgcggctgggccttcgtctaccacgtcttcatatttttgctggtcttcagctgcctggtgctgtctgtgctgtccactatccaggagcaccaggaacttgccaacgagtgtctcctcatcttggaattcgtgatgatcgtggttttcggcttggagtacatcgtccgggtctggtccgccggatgctgctgccgctaccgaggatggcagggtcgcttccgctttgccagaaagcccttctgtgtcatcgacttcatcgtgttcgtggcctcggtggccgtcatcgccgcgggtacccagggcaacatcttcgccacgtccgcgctgcgcagcatgcgcttcctgcagatcctgcgcatggtgcgcatggaccgccgcggcggcacctggaagctgctgggctcagtggtctacgcgcatagcaaggagctgatcaccgcctggtacatcgggttcctggtgctcatcttcgcctccttcctggtctacctggctgagaaggacgccaactccgacttctcctcctacgccgactcgctctggtgggggacgattacattgacaaccatcggctatggtgacaagacaccgcacacatggctgggcagggtcctggctgctggcttcgccttactgggcatctctttctttgccctgcctgccggcatcctaggctccggctttgccctgaaggtccaggagcagcaccggcagaagcacttcgagaagcggaggatgccggcagccaacctcatccaggctgcctggcgcctgtactccaccgatatgagccgggcctacctgacagccacctggtactactatgacagtatcctcccatccttcagcagccggatgggcatcaaagaccgcatccgcatgggcagctcccagcggcggacgggtccttccaagcagcatctggcacctccaacaatgcccacctccccaagcagcgagcaggtgggtgaggccaccagccccaccaaggtgcaaaagagctggagcttcaatgaccgcacccgcttccgggcatctctgagactcaaaccccgcacctctgctgaggatgccccctcagaggaagtagcagaggagaagagctaccagtgtgagctcacggtggacgacatcatgcctgctgtgaagacagtcatccgctccatcaggattctcaagttcctggtggccaaaaggaaattcaaggagacactgcgaccgtacgacgtgaaggacgtcattgagcagtactcagcaggccacctggacatgctgggccggatcaagagcctgcaaactcgggtggaccaaattgtgggtcgggggcccggggacaggaaggcccgggagaagggcgacaaggggccctccgacgcggaggtggtggatgaaatcagcatgatgggacgcgtggtcaaggtggagaagcaggtgcagtccatcgagcacaagctggacctgctgttgggcttctattcgcgctgcctgcgctctggcacctcggccagcctgggcgccgtgcaagtgccgctgttcgaccccgacatcacctccgactaccacagccctgtggaccacgaggacatctccgtctccgcacagacgctcagcatctcccgctcggtcagcaccaacatggactgagggacttctcagaggcagggcagcacacggccagccccgcggcctggcgctccgactgccctctgaggcctccggactcctctcgtacttgaactcactccctcacggggagagagaccacacgcagtattgagctgcctgagtgggcgtggtacctgctgtgggtgccagcgccccttccccacctcaggagcgtgagatgccaggtcgcacagagggcagcagcagcggccgtcccgcggcctctgggccccccagtgccctgcccactccatcaaggccctatgtggcccacctggcaggggcacagccccgggagtgggagcgggcgctggggccctgggccctgacccagcttccagctatgcaaggtgaggtctctggcccacccttcggacacagcagggaagccctcccgccaagtccccgccccacttgggggtgggccaaggtgcccccacaggtacccacaaagcacaggaccctgccacaaggcaggtggacaccatatatgcaaaccatgttaaatatgcaactttggggacccccatggggtctctctgtccctcccccattgggagctgggcccccagcagtagctggtctcaggctgcttggccaccaccctgtccctattctttggcttatcactccttcccctcccagcatggggcctgtttctcccctgccctctcctaagggcaatgcctgggcctttcttcccatttgcaagtgtcagctcccaggggctccctcctcctgctgggtggccactcccctccttggccctccagacaccactcatagtcagcacaggtttctgtatcctccccaaaactcccagacagtgcttcgtggacgatcgcacaaacatagccttttagtttctccagacaggaagaaagcctctcacacttaaacatgcaatgacgtgacacacttggagacatgagtgcagagccactcagccgctcctgggcctctgcagcagatgccagtggactggccttgcagggtgacgaccactaagaggaagacccccaactccatctgagcaggagaaggagctttgaagtaacccgagagctctccaggccccacccagacctttacccgctccccttcttcaagaagatctcctcctctctggtccaggagccctaacccactgcctctgcctgtccccaagggcccgcctccgtgtctccacagcacaactcgggcccaggcctgacaccactggagagaccccaggcccacttctagccaggcctgtgccttcctagtcactctaactcccagagagaataagaatgcatgtaatagctataccaaccgcgcatccggctttcacatgcactgtctcccctccctccacaccccacttcttcacttcaattggcagcgccacatccaggcgtcagcccccattcactccaggaacactttcttatccccacccctttgctcctcttctgcaaagccaatgcaggtggcaggaaggtgaggggtagtggaccaatggcaaccctctgtgggaacaaggggccgaggccacgctgcctgcatctcgtgctggggacctgcatgcgccagcaccagggcttggactggatcttactcagtccatggtgcccagcctctgccccaacatgccctctgcatgtgaccgtcatgccctggatggagccactcctggctcaccccacctgcactgcactgtccccagagagccacccctccacccactcagagacagctgtggagagggccaggagaatgggattaccctatgaccaaggagacatgggaagaagccctccttccttccacgatcgaggttccgccatcaactcggttctcggatatgcaagtacctcactttgttaacttattaacttattggtttcattaaagttttcaagagga

SEQ ID NO: 8 - DNA, 3345 bp, Homo sapiens
  source 1..3345: mol_type = other DNA
gaccactcgtaccacaaagtgggcagctgaggagctgatcaccgcctggtacatcgggttcctggtgctcatcttcgcctccttcctggtctacctggctgagaaggacgccaactccgacttctcctcctacgccgactcgctctggtgggggacgattacattgacaaccatcggctatggtgacaagacaccgcacacatggctgggcagggtcctggctgctggcttcgccttactgggcatctctttctttgccctgcctgccggcatcctaggctccggctttgccctgaaggtccaggagcagcaccggcagaagcacttcgagaagcggaggatgccggcagccaacctcatccaggctgcctggcgcctgtactccaccgatatgagccgggcctacctgacagccacctggtactactatgacagtatcctcccatccttcagagagctggccctcttgtttgagcacgtgcaacgggcccgcaatgggggcctacggcccctggaggtgcggcgggcgccggtacccgacggagcaccctcccgttacccgcccgttgccacctgccaccggccgggcagcacctccttctgccctggggaaagcagccggatgggcatcaaagaccgcatccgcatgggcagctcccagcggcggacgggtccttccaagcagcatctggcacctccaacaatgcccacctccccaagcagcgagcaggtgggtgaggccaccagccccaccaaggtgcaaaagagctggagcttcaatgaccgcacccgcttccgggcatctctgagactcaaaccccgcacctctgctgaggatgccccctcagaggaagtagcagaggagaagagctaccagtgtgagctcacggtggacgacatcatgcctgctgtgaagacagtcatccgctccatcaggattctcaagttcctggtggccaaaaggaaattcaaggagacactgcgaccgtacgacgtgaaggacgtcattgagcagtactcagcaggccacctggacatgctgggccggatcaagagcctgcaaactcgggtggaccaaattgtgggtcgggggcccggggacaggaaggcccgggagaagggcgacaaggggccctccgacgcggaggtggtggatgaaatcagcatgatgggacgcgtggtcaaggtggagaagcaggtgcagtccatcgagcacaagctggacctgctgttgggcttctattcgcgctgcctgcgctctggcacctcggccagcctgggcgccgtgcaagtgccgctgttcgaccccgacatcacctccgactaccacagccctgtggaccacgaggacatctccgtctccgcacagacgctcagcatctcccgctcggtcagcaccaacatggactgagggacttctcagaggcagggcagcacacggccagccccgcggcctggcgctccgactgccctctgaggcctccggactcctctcgtacttgaactcactccctcacggggagagagaccacacgcagtattgagctgcctgagtgggcgtggtacctgctgtgggtgccagcgccccttccccacctcaggagcgtgagatgccaggtcgcacagagggcagcagcagcggccgtcccgcggcctctgggccccccagtgccctgcccactccatcaaggccctatgtggcccacctggcaggggcacagccccgggagtgggagcgggcgctggggccctgggccctgacccagcttccagctatgcaaggtgaggtctctggcccacccttcggacacagcagggaagccctcccgccaagtccccgccccacttgggggtgggccaaggtgcccccacaggtacccacaaagcacaggaccctgccacaaggcaggtggacaccatatatgcaaaccatgttaaatatgcaactttggggacccccatggggtctctctgtccctcccccattgggagctgggcccccagcagtagctggtctcaggctgcttggccaccaccctgtccctattctttggcttatcactccttcccctcccagcatggggcctgtttctcccctgccctctcctaagggcaatgcctgggcctttcttcccatttgcaagtgtcagctcccaggggctccctcctcctgctgggtggccactcccctccttggccctccagacaccactcatagtcagcacaggtttctgtatcctccccaaaactcccagacagtgcttcgtggacgatcgcacaaacatagccttttagtttctccagacaggaagaaagcctctcacacttaaacatgcaatgacgtgacacacttggagacatgagtgcagagccactcagccgctcctgggcctctgcagcagatgccagtggactggccttgcagggtgacgaccactaagaggaagacccccaactccatctgagcaggagaaggagctttgaagtaacccgagagctctccaggccccacccagacctttacccgctccccttcttcaagaagatctcctcctctctggtccaggagccctaacccactgcctctgcctgtccccaagggcccgcctccgtgtctccacagcacaactcgggcccaggcctgacaccactggagagaccccaggcccacttctagccaggcctgtgccttcctagtcactctaactcccagagagaataagaatgcatgtaatagctataccaaccgcgcatccggctttcacatgcactgtctcccctccctccacaccccacttcttcacttcaattggcagcgccacatccaggcgtcagcccccattcactccaggaacactttcttatccccacccctttgctcctcttctgcaaagccaatgcaggtggcaggaaggtgaggggtagtggaccaatggcaaccctctgtgggaacaaggggccgaggccacgctgcctgcatctcgtgctggggacctgcatgcgccagcaccagggcttggactggatcttactcagtccatggtgcccagcctctgccccaacatgccctctgcatgtgaccgtcatgccctggatggagccactcctggctcaccccacctgcactgcactgtccccagagagccacccctccacccactcagagacagctgtggagagggccaggagaatgggattaccctatgaccaaggagacatgggaagaagccctccttccttccacgatcgaggttccgccatcaactcggttctcggatatgcaagtacctcactttgttaacttattaacttattggtttcattaaagttttcaagaggaggtga

SEQ ID NO: 9 - DNA, 2085 bp, synthetic construct
  misc_feature 1..2085: note = Description of Artificial Sequence: Syntheticpolynucleotide
  source 1..2085: mol_type = other DNA
atggctgaagcccctcctagaaggcttggactgggacctcctcctggggatgctcctagagctgaactggtggctctgacagccgtgcagtctgaacaaggcgaagctggtggcggcggatctccacgtagacttggactgctgggaagccctcttcctcctggtgctccacttcctggacctggcagtggatctggatctgcctgtggccagagaagctctgccgctcacaagagataccggcggctgcagaactgggtgtacaacgtgctggaaagacccagaggctgggccttcgtgtaccacgtgttcatctttctgctggtgttcagctgcctggtgctgtccgtgctgagcaccatccaagaacatcaagagctggctaacgagtgcctgttaatactggagtttgtgatgattgtggtgttcggcctcgagtacatcgtccgcgtttggagcgccggctgctgctgcagatatagaggttggcaaggcagattccgcttcgccagaaagcccttctgcgtgatcgacttcatcgtgttcgtggccagcgtggccgtgattgctgctggcacacagggcaacatcttcgccacaagcgccctgcggagcatgcggtttctgcagatcctgagaatggtccgaatggacagaagaggcggcacctggaagctgctgggctctgtggtgtacgcccacagcaaagagctgatcaccgcctggtacatcggatttctggtgctgatcttcgcctccttcctggtgtacctggccgagaaggacgccaacagcgactttagcagctacgccgactctctttggtggggcaccatcacactgaccaccatcggctacggcgacaagacccctcacacatggctgggaagagtgctggccgctggatttgctctgctgggcatcagctttttcgccctgcctgccggaatcctcggatctggctttgccctgaaggtgcaagagcagcaccggcagaagcacttcgagaagagaagaatgcctgccgccaacctgattcaggccgcttggagactgtacagcaccgacatgagcagagcctacctgaccgccacgtggtattattacgactcgatcctgcctagcttccgcgaactggccctgctgtttgagcatgtgcagagagccagaaacggcggcctcagacctctggaagttcggagagcacctgtgcctgatggcgccccttctagatatcctccagtggccacctgtcacagacccggcagcacatctttttgccctggcgagtctagccggatgggcatcaaggacagaatcagaatgggcagcagccagcggagaacaggcccttctaaacagcatctggcccctccaaccatgcctacaagccctagctctgagcaagtgggcgaagccacctctcctaccaaggtgcagaagtcctggtccttcaacgaccggaccagattcagagccagcctgagactgaagcccagaacctctgccgaggatgccccttctgaagaggtggccgaagagaagtcctaccagtgcgagctgaccgtggacgacatcatgccagccgtgaaaaccgtgatacggtctatccggatcctgaagttcctggtggccaagcggaagttcaaagagacactgcggccctacgacgtgaaggacgtgatcgagcagtattctgccggccacctggacatgctgggcagaatcaagagcctgcagaccagagtggaccagatcgttggaagaggcccaggcgacagaaaggccagagagaagggcgataagggcccatctgatgccgaggttgtcgacgagatatcaatgatgggcagagtggtcaaggtggaaaaacaggtgcagagcatcgagcacaagctggacctgctgctgggattctacagccggtgtctgagaagcggcacatctgcatctctgggcgctgtgcaggtcccactgttcgaccctgatatcaccagcgactatcacagccccgtggaccacgaggacatctccgtttctgctcagaccctgagcatcagcagatccgtgtccaccaacatggac

SEQ ID NO: 10 - DNA, 2085 bp, synthetic construct
  misc_feature 1..2085: note = Description of Artificial Sequence: Syntheticpolynucleotide
  source 1..2085: mol_type = other DNA
atggctgaagcccctcctagaaggcttggactgggacctcctcctggggatgctcctagagctgaactggtggctctgacagccgtgcagtctgaacaaggcgaagctggtggcggcggatctccacgtagacttggactgctgggaagccctcttcctcctggtgctccacttcctggacctggcagtggatctggatctgcctgtggccagagaagctctgccgctcacaagagataccggcggctgcagaactgggtgtacaacgtgctggaaagacccagaggctgggccttcgtgtaccacgtgttcatctttctgctggtgttcagctgcctggtgctgtccgtgctgagcaccatccaagaacatcaagagctggctaacgagtgcctgttaatactggagtttgtgatgattgtggtgttcggcctcgagtacatcgtccgcgtttggagcgccggctgctgctgcagatatagaggttggcaaggcagattccgcttcgccagaaagcccttctgcgtgatcgacttcatcgtgttcgtggccagcgtggccgtgattgctgctggcacacagggcaacatcttcgccacaagcgccctgcggagcatgcggtttctgcagatcctgagaatggtccgaatggacagaagaggcggcacctggaagctgctgggctctgtggtgtacgcccacagcaaagagctgatcaccgcctggtacatcggatttctggtgctgatcttcgcctccttcctggtgtacctggccgagaaggacgccaacagcgactttagcagctacgccgactctctttggtggggcaccatcacactgaccaccatcggctacggcgacaagacccctcacacatggctgggaagagtgctggccgctggatttgctctgctgggcatcagctttttcgccctgcctgccggaatcctcggatctggctttgccctgaaggtgcaagagcagcatagacaaaagcattttgaaaagagaagaatgcctgccgccaacctgattcaggccgcttggagactgtacagcaccgacatgagcagagcctacctgaccgccacgtggtattattacgattcgatcctgcctagcttccgcgaactggccctgctgtttgagcatgtgcagagagccagaaacggcggcctcagacctctggaagttcggagagcacctgtgcctgatggcgccccttctagatatcctccagtggccacctgtcacagacccggcagcacatctttttgccctggcgagtctagccggatgggcatcaaggacagaatcagaatgggcagcagccagcggagaacaggcccttctaaacagcatctggcccctccaaccatgcctacaagccctagctctgagcaagtgggcgaagccacctctcctaccaaggtgcagaagtcctggtccttcaacgaccggaccagatttagagccagcctccggctgaagcccagaacctctgccgaggatgccccttctgaagaggtggccgaagagaagtcctaccagtgcgagctgaccgtggacgacatcatgccagccgtgaaaaccgtgataaggtctatacgcatcctgaagttcctggtggccaagcggaagttcaaagagacactgcggccctacgacgtgaaggacgtgatcgagcagtattctgccggccacctggacatgctgggcagaatcaagagcctgcagaccagagtggaccagatcgttggaagaggcccaggcgacagaaaggccagagagaagggcgataagggcccatctgatgccgaggttgtcgacgagatatcaatgatgggcagagtcgtgaaagtcgaaaaacaggtgcagagcatcgagcacaagctggacctgctgctgggattctacagccggtgtctgagaagcggcacatctgcatctctgggcgctgtgcaggtcccactgttcgatcctgatattacgagcgattatcacagccccgtggaccacgaggacatctccgtttctgctcagaccctgagcatcagcagatccgtgtccaccaacatggac

SEQ ID NO: 11 - protein, 695 aa, Homo sapiens [sequence omitted]

SEQ ID NO: 12 - protein, 641 aa, Homo sapiens
MAEAPPRRLGLGPPPGDAPRAELVALTAVQSEQGEAGGGGSPRRLGLLGSPLPPGAPLPGPGSGSGSACGQRSSAAHKRYRRLQNWVYNVLERPRGWAFVYHVFIFLLVFSCLVLSVLSTIQEHQELANECLLILEFVMIVVFGLEYIVRVWSAGCCCRYRGWQGRFRFARKPFCVIDFIVFVASVAVIAAGTQGNIFATSALRSMRFLQILRMVRMDRRGGTWKLLGSVVYAHSKELITAWYIGFLVLIFASFLVYLAEKDANSDFSSYADSLWWGTITLTTIGYGDKTPHTWLGRVLAAGFALLGISFFALPAGILGSGFALKVQEQHRQKHFEKRRMPAANLIQAAWRLYSTDMSRAYLTATWYYYDSILPSFSSRMGIKDRIRMGSSQRRTGPSKQHLAPPTMPTSPSSEQVGEATSPTKVQKSWSFNDRTRFRASLRLKPRTSAEDAPSEEVAEEKSYQCELTVDDIMPAVKTVIRSIRILKFLVAKRKFKETLRPYDVKDVIEQYSAGHLDMLGRIKSLQTRVDQIVGRGPGDRKAREKGDKGPSDAEVVDEISMMGRVVKVEKQVQSIEHKLDLLLGFYSRCLRSGTSASLGAVQVPLFDPDITSDYHSPVDHEDISVSAQTLSISRSVSTNMD

SEQ ID NO: 13 - protein, 356 aa, Homo sapiens
MPAANLIQAAWRLYSTDMSRAYLTATWYYYDSILPSFRELALLFEHVQRARNGGLRPLEVRRAPVPDGAPSRYPPVATCHRPGSTSFCPGESSRMGIKDRIRMGSSQRRTGPSKQHLAPPTMPTSPSSEQVGEATSPTKVQKSWSFNDRTRFRASLRLKPRTSAEDAPSEEVAEEKSYQCELTVDDIMPAVKTVIRSIRILKFLVAKRKFKETLRPYDVKDVIEQYSAGHLDMLGRIKSLQTRVDQIVGRGPGDRKAREKGDKGPSDAEVVDEISMMGRVVKVEKQVQSIEHKLDLLLGFYSRCLRSGTSASLGAVQVPLFDPDITSDYHSPVDHEDISVSAQTLSISRSVSTNMD

SEQ ID NO: 14 - protein, 736 aa, synthetic construct
  REGION 1..736: note = Description of Artificial Sequence: Syntheticpolypeptide
MAADGYLPDWLEDNLSEGIREWWDLKPGAPKPKANQQKQDDGRGLVLPGYKYLGPFNGLDKGEPVNAADAAALEHDKAYDQQLKAGDNPYLRYNHADAEFQERLQEDTSFGGNLGRAVFQAKKRVLEPLGLVEEGAKTAPGKKRPVEQSPQEPDSSSGIGKKGQQPARKRLNFGQTGDSESVPDPQPLGEPPAAPSGVGSNTMAAGGGAPMADNNEGADGVGNASGNWHCDSTWLGDRVITTSTRTWALPTYNNHLYKQISSQSGGSTNDNTYFGYSTPWGYFDFNRFHCHFSPRDWQRLINNNWGFRPKKLNFKLFNIQVKEVTTNDGTTTIANNLTSTVQVFTDSEYQLPYVLGSAHQGCLPPFPADVFMIPQYGYLTLNNGSQAVGRSSFYCLEYFPSQMLRTGNNFQFSYTFEDVPFHSSYAHSQSLDRLMNPLIDQYLYYLSRTQTTSGTAGNRTLQFSQAGPSSMANQAKNWLPGPCYRQQRVSKTTNQNNNSNFAWTGATKYHLNGRDSLVNPGPAMATHKDDEDKFFPMSGVLIFGKQGAGNSNVDLDNVMITNEEEIKTTNPVATEEYGTVATNLQSANTAPATGTVNSQGALPGMVWQDRDVYLQGPIWAKIPHTDGHFHPSPLMGGFGLKHPPPQILIKNTPVPANPPTTFSPAKFASFITQYSTGQVSVEIEWELQKENSKRWNPEIQYTSNYNKSTNVDFAVDTNGVYSEPRPIGTRYLTRNL

SEQ ID NO: 15 - DNA, 145 bp, synthetic construct
  misc_feature 1..145: note = Description of Artificial Sequence: Syntheticpolynucleotide
  source 1..145: mol_type = other DNA
ttggccactccctctctgcgcgctcgctcgctcactgaggccgcccgggcaaagcccgggcgtcgggcgacctttggtcgcccggcctcagtgagcgagcgagcgcgcagagagggagtggccaactccatcactaggggttcct

SEQ ID NO: 16 - DNA, 145 bp, synthetic construct
  misc_feature 1..145: note = Description of Artificial Sequence: Syntheticpolynucleotide
  source 1..145: mol_type = other DNA
aggaacccctagtgatggagttggccactccctctctgcgcgctcgctcgctcactgaggccgggcgaccaaaggtcgcccgacgcccgggctttgcccgggcggcctcagtgagcgagcgagcgcgcagagagggagtggccaa

SEQ ID NO: 17 - DNA, 127 bp, synthetic construct
  misc_feature 1..127: note = Description of Artificial Sequence: Syntheticpolynucleotide
  source 1..127: mol_type = other DNA
cctgcaggcagctgcgcgctcgctcgctcactgaggccgcccgggcgtcgggcgacctttggtcgcccggcctcagtgagcgagcgagcgcgcagagagggagtggccaactccatcactaggggtt

SEQ ID NO: 18 - DNA, 141 bp, synthetic construct
  misc_feature 1..141: note = Description of Artificial Sequence: Syntheticpolynucleotide
  source 1..141: mol_type = other DNA
aggaacccctagtgatggagttggccactccctctctgcgcgctcgctcgctcactgaggccgggcgaccaaaggtcgcccgacgcccgggctttgcccgggcggcctcagtgagcgagcgagcgcgcagctgcctgcagg

SEQ ID NO: 19 - DNA, 119 bp, synthetic construct
  misc_feature 1..119: note = Description of Artificial Sequence: Syntheticpolynucleotide
  source 1..119: mol_type = other DNA
ctgcgcgctcgctcgctcactgaggccgcccgggcgtcgggcgacctttggtcgcccggcctcagtgagcgagcgagcgcgcagagagggagtggccaactccatcactaggggttcct

SEQ ID NO: 20 - DNA, 130 bp, synthetic construct
  misc_feature 1..130: note = Description of Artificial Sequence: Syntheticpolynucleotide
  source 1..130: mol_type = other DNA
aggaacccctagtgatggagttggccactccctctctgcgcgctcgctcgctcactgaggccgggcgaccaaaggtcgcccgacgcccgggctttgcccgggcggcctcagtgagcgagcgagcgcgcag

SEQ ID NO: 21 - DNA, 145 bp, synthetic construct; identical to SEQ ID NO: 15
  misc_feature 1..145: note = Description of Artificial Sequence: Syntheticpolynucleotide
  source 1..145: mol_type = other DNA

SEQ ID NO: 22 - DNA, 381 bp, synthetic construct
  misc_feature 1..381: note = Description of Artificial Sequence: Syntheticpolynucleotide
  source 1..381: mol_type = other DNA
gacattgattattgactagttattaatagtaatcaattacggggtcattagttcatagcccatatatggagttccgcgttacataacttacggtaaatggcccgcctggctgaccgcccaacgacccccgcccattgacgtcaataatgacgtatgttcccatagtaacgccaatagggactttccattgacgtcaatgggtggactatttacggtaaactgcccacttggcagtacatcaagtgtatcatatgccaagtacgccccctattgacgtcaatgacggtaaatggcccgcctggcattatgcccagtacatgaccttatgggactttcctacttggcagtacatctacgtattagtcatcgctattaccatgg

SEQ ID NO: 23 - DNA, 279 bp, synthetic construct
  misc_feature 1..279: note = Description of Artificial Sequence: Syntheticpolynucleotide
  source 1..279: mol_type = other DNA
gtcgaggtgagccccacgttctgcttcactctccccatctcccccccctccccacccccaattttgtatttatttattttttaattattttgtgcagcgatgggggcggggggggggggggggcgcgcgccaggcggggcggggcggggcgaggggcggggcggggcgaggcggagaggtgcggcggcagccaatcagagcggcgcgctccgaaagtttccttttatggcgaggcggcggcggcggcggccctataaaaagcgaagcgcgcggcgggcg

SEQ ID NO: 24 - DNA, 1013 bp, synthetic construct
  misc_feature 1..1013: note = Description of Artificial Sequence: Syntheticpolynucleotide
  source 1..1013: mol_type = other DNA
ggagtcgctgcgttgccttcgccccgtgccccgctccgcgccgcctcgcgccgcccgccccggctctgactgaccgcgttactcccacaggtgagcgggcgggacggcccttctcctccgggctgtaattagcgcttggtttaatgacggctcgtttcttttctgtggctgcgtgaaagccttaaagggctccgggagggccctttgtgcgggggggagcggctcggggggtgcgtgcgtgtgtgtgtgcgtggggagcgccgcgtgcggcccgcgctgcccggcggctgtgagcgctgcgggcgcggcgcggggctttgtgcgctccgcgtgtgcgcgaggggagcgcggccgggggcggtgccccgcggtgcgggggggctgcgaggggaacaaaggctgcgtgcggggtgtgtgcgtgggggggtgagcagggggtgtgggcgcggcggtcgggctgtaacccccccctgcacccccctccccgagttgctgagcacggcccggcttcgggtgcggggctccgtgcggggcgtggcgcggggctcgccgtgccgggcggggggtggcggcaggtgggggtgccgggcggggcggggccgcctcgggccggggagggctcgggggaggggcgcggcggcccccggagcgccggcggctgtcgaggcgcggcgagccgcagccattgccttttatggtaatcgtgcgagagggcgcagggacttcctttgtcccaaatctgtgcggagccgaaatctgggaggcgccgccgcaccccctctagcgggcgcggggcgaagcggtgcggcgccggcaggaaggaaatgggcggggagggccttcgtgcgtcgccgcgccgccgtccccttctccctctccagcctcggggctgtccgcggggggacggctgccttcgggggggacggggcagggcggggttcggcttctggcgtgtgaccggcggctctagagcctctgctaaccatgttcatgccttcttctttttcctacag

SEQ ID NO: 25 - DNA, 307 bp, Homo sapiens
  source 1..307: mol_type = other DNA
gacatgtgagcggcgcgcgccggtggcaggtggaaaggcgagcggcatggagcgcgtaataagagagttggagtcggaaagagcagccccagtcgccggggaagcgggaggtcagtgcgggctccggcggcccccaggctccgagcgcccgcccgcggccccggcccggcccctagcccccgccgcccgcgcccgccccgggtcgcccctctggccccgggtccgagccatgcgtctctgagcgccccgagcgcgcccccgccccggaccgtgcccgggccccggcgcccccagcccggcgccgccc

SEQ ID NO: 26 - DNA, 307 bp, Homo sapiens; identical to SEQ ID NO: 25
  source 1..307: mol_type = other DNA

SEQ ID NO: 27 - DNA, 340 bp, Homo sapiens
  source 1..340: mol_type = other DNA
gaccactcgtaccacaaagtgggcagctgaggagctgatcaccgcctggtacatcgggttcctggtgctcatcttcgcctccttcctggtctacctggctgagaaggacgccaactccgacttctcctcctacgccgactcgctctggtgggggacgattacattgacaaccatcggctatggtgacaagacaccgcacacatggctgggcagggtcctggctgctggcttcgccttactgggcatctctttctttgccctgcctgccggcatcctaggctccggctttgccctgaaggtccaggagcagcaccggcagaagcacttcgagaagcggagg

SEQ ID NO: 28 - DNA, 1929 bp, Homo sapiens
  source 1..1929: mol_type = other DNA
gggacttctcagaggcagggcagcacacggccagccccgcggcctggcgctccgactgccctctgaggcctccggactcctctcgtacttgaactcactccctcacggggagagagaccacacgcagtattgagctgcctgagtgggcgtggtacctgctgtgggtgccagcgccccttccccacctcaggagcgtgagatgccaggtcgcacagagggcagcagcagcggccgtcccgcggcctctgggccccccagtgccctgcccactccatcaaggccctatgtggcccacctggcaggggcacagccccgggagtgggagcgggcgctggggccctgggccctgacccagcttccagctatgcaaggtgaggtctctggcccacccttcggacacagcagggaagccctcccgccaagtccccgccccacttgggggtgggccaaggtgcccccacaggtacccacaaagcacaggaccctgccacaaggcaggtggacaccatatatgcaaaccatgttaaatatgcaactttggggacccccatggggtctctctgtccctcccccattgggagctgggcccccagcagtagctggtctcaggctgcttggccaccaccctgtccctattctttggcttatcactccttcccctcccagcatggggcctgtttctcccctgccctctcctaagggcaatgcctgggcctttcttcccatttgcaagtgtcagctcccaggggctccctcctcctgctgggtggccactcccctccttggccctccagacaccactcatagtcagcacaggtttctgtatcctccccaaaactcccagacagtgcttcgtggacgatcgcacaaacatagccttttagtttctccagacaggaagaaagcctctcacacttaaacatgcaatgacgtgacacacttggagacatgagtgcagagccactcagccgctcctgggcctctgcagcagatgccagtggactggccttgcagggtgacgaccactaagaggaagacccccaactccatctgagcaggagaaggagctttgaagtaacccgagagctctccaggccccacccagacctttacccgctccccttcttcaagaagatctcctcctctctggtccaggagccctaacccactgcctctgcctgtccccaagggcccgcctccgtgtctccacagcacaactcgggcccaggcctgacaccactggagagaccccaggcccacttctagccaggcctgtgccttcctagtcactctaactcccagagagaataagaatgcatgtaatagctataccaaccgcgcatccggctttcacatgcactgtctcccctccctccacaccccacttcttcacttcaattggcagcgccacatccaggcgtcagcccccattcactccaggaacactttcttatccccacccctttgctcctcttctgcaaagccaatgcaggtggcaggaaggtgaggggtagtggaccaatggcaaccctctgtgggaacaaggggccgaggccacgctgcctgcatctcgtgctggggacctgcatgcgccagcaccagggcttggactggatcttactcagtccatggtgcccagcctctgccccaacatgccctctgcatgtgaccgtcatgccctggatggagccactcctggctcaccccacctgcactgcactgtccccagagagccacccctccacccactcagagacagctgtggagagggccaggagaatgggattaccctatgaccaaggagacatgggaagaagccctccttccttccacgatcgaggttccgccatcaactcggttctcggatatgcaagtacctcactttgttaacttattaacttattggtttcattaaagttttcaagagga

SEQ ID NO: 29 - DNA, 1929 bp, Homo sapiens; identical to SEQ ID NO: 28
  source 1..1929: mol_type = other DNA

SEQ ID NO: 30 - DNA, 1934 bp, Homo sapiens
  source 1..1934: mol_type = other DNA
gggacttctcagaggcagggcagcacacggccagccccgcggcctggcgctccgactgccctctgaggcctccggactcctctcgtacttgaactcactccctcacggggagagagaccacacgcagtattgagctgcctgagtgggcgtggtacctgctgtgggtgccagcgccccttccccacctcaggagcgtgagatgccaggtcgcacagagggcagcagcagcggccgtcccgcggcctctgggccccccagtgccctgcccactccatcaaggccctatgtggcccacctggcaggggcacagccccgggagtgggagcgggcgctggggccctgggccctgacccagcttccagctatgcaaggtgaggtctctggcccacccttcggacacagcagggaagccctcccgccaagtccccgccccacttgggggtgggccaaggtgcccccacaggtacccacaaagcacaggaccctgccacaaggcaggtggacaccatatatgcaaaccatgttaaatatgcaactttggggacccccatggggtctctctgtccctcccccattgggagctgggcccccagcagtagctggtctcaggctgcttggccaccaccctgtccctattctttggcttatcactccttcccctcccagcatggggcctgtttctcccctgccctctcctaagggcaatgcctgggcctttcttcccatttgcaagtgtcagctcccaggggctccctcctcctgctgggtggccactcccctccttggccctccagacaccactcatagtcagcacaggtttctgtatcctccccaaaactcccagacagtgcttcgtggacgatcgcacaaacatagccttttagtttctccagacaggaagaaagcctctcacacttaaacatgcaatgacgtgacacacttggagacatgagtgcagagccactcagccgctcctgggcctctgcagcagatgccagtggactggccttgcagggtgacgaccactaagaggaagacccccaactccatctgagcaggagaaggagctttgaagtaacccgagagctctccaggccccacccagacctttacccgctccccttcttcaagaagatctcctcctctctggtccaggagccctaacccactgcctctgcctgtccccaagggcccgcctccgtgtctccacagcacaactcgggcccaggcctgacaccactggagagaccccaggcccacttctagccaggcctgtgccttcctagtcactctaactcccagagagaataagaatgcatgtaatagctataccaaccgcgcatccggctttcacatgcactgtctcccctccctccacaccccacttcttcacttcaattggcagcgccacatccaggcgtcagcccccattcactccaggaacactttcttatccccacccctttgctcctcttctgcaaagccaatgcaggtggcaggaaggtgaggggtagtggaccaatggcaaccctctgtgggaacaaggggccgaggccacgctgcctgcatctcgtgctggggacctgcatgcgccagcaccagggcttggactggatcttactcagtccatggtgcccagcctctgccccaacatgccctctgcatgtgaccgtcatgccctggatggagccactcctggctcaccccacctgcactgcactgtccccagagagccacccctccacccactcagagacagctgtggagagggccaggagaatgggattaccctatgaccaaggagacatgggaagaagccctccttccttccacgatcgaggttccgccatcaactcggttctcggatatgcaagtacctcactttgttaacttattaacttattggtttcattaaagttttcaagaggaggtga

SEQ ID NO: 31 - DNA, 82 bp, synthetic construct
  misc_feature 1..82: note = Description of Artificial Sequence: Syntheticoligonucleotide
  source 1..82: mol_type = other DNA
gtaagtatcaaggttacaagacaggtttaaggagaccaatagaaactgggcttgtcgagacagagaagactcttgcgtttct

SEQ ID NO: 32 - DNA, 51 bp, synthetic construct
  misc_feature 1..51: note = Description of Artificial Sequence: Syntheticoligonucleotide
  source 1..51: mol_type = other DNA
gataggcacctattggtcttactgacatccactttgcctttctctccacag

SEQ ID NO: 33 - DNA, 240 bp, synthetic construct
  misc_feature 1..240: note = Description of Artificial Sequence: Syntheticpolynucleotide
  source 1..240: mol_type = other DNA
gctgatcagcctcgactgtgccttctagttgccagccatctgttgtttgcccctcccccgtgccttccttgaccctggaaggtgccactcccactgtcctttcctaataaaatgaggaaattgcatcgcattgtctgagtaggtgtcattctattctggggggtggggtggggcaggacagcaagggggaggattgggaagacaatagcaggcatgctggggatgcggtgggctctatgg

SEQ ID NO: 34 - DNA, 49 bp, synthetic construct
  misc_feature 1..49: note = Description of Artificial Sequence: Syntheticoligonucleotide
  source 1..49: mol_type = other DNA
aataaaatatctttattttcattacatctgtgtgttggttttttgtgtg

SEQ ID NO: 35 - DNA, 48 bp, synthetic construct
  misc_feature 1..48: note = Description of Artificial Sequence: Syntheticoligonucleotide
  source 1..48: mol_type = other DNA
cggcaataaaaagacagaataaaacgcacggtgttgggtcgtttgttc

SEQ ID NO: 36 - DNA, 225 bp, synthetic construct
  misc_feature 1..225: note = Description of Artificial Sequence: Syntheticpolynucleotide
  source 1..225: mol_type = other DNA
ctgtgccttctagttgccagccatctgttgtttgcccctcccccgtgccttccttgaccctggaaggtgccactcccactgtcctttcctaataaaatgaggaaattgcatcgcattgtctgagtaggtgtcattctattctggggggtggggtggggcaggacagcaagggggaggattgggaagacaatagcaggcatgctggggatgcggtgggctctatgg

SEQ ID NO: 37 - DNA, 589 bp, synthetic construct
  misc_feature 1..589: note = Description of Artificial Sequence: Syntheticpolynucleotide
  source 1..589: mol_type = other DNA
aatcaacctctggattacaaaatttgtgaaagattgactggtattcttaactatgttgctccttttacgctatgtggatacgctgctttaatgcctttgtatcatgctattgcttcccgtatggctttcattttctcctccttgtataaatcctggttgctgtctctttatgaggagttgtggcccgttgtcaggcaacgtggcgtggtgtgcactgtgtttgctgacgcaacccccactggttggggcattgccaccacctgtcagctcctttccgggactttcgctttccccctccctattgccacggcggaactcatcgccgcctgccttgcccgctgctggacaggggctcggctgttgggcactgacaattccgtggtgttgtcggggaagctgacgtcctttccatggctgctcgcctgtgttgccacctggattctgcgcgggacgtccttctgctacgtcccttcggccctcaatccagcggaccttccttcccgcggcctgctgccggctctgcggcctcttccgcgtcttcgccttcgccctcagacgagtcggatctccctttgggccgcctccccgc

SEQ ID NO: 38 - protein, 158 aa, synthetic construct
  REGION 1..158: note = Description of Artificial Sequence: Syntheticpolypeptide
ISLIAALAVDHVIGMETVMPWNLPADLAWFKRNTLNKPVIMGRHTWESIGRPLPGRKNIILSSQPSTDDRVTWVKSVDEAIAACGDVPEIMVIGGGRVYEQFLPKAQKLYLTHIDAEVEGDTHFPDYEPDDWESVFSEFHDADAQNSHSYCFEILERR

SEQ ID NO: 39 - DNA, 48 bp, synthetic construct
  misc_feature 1..48: note = Description of Artificial Sequence: Syntheticoligonucleotide
  source 1..48: mol_type = other DNA
gcctgcaagaactggttcagcagcctgagccacttcgtgatccacctg

SEQ ID NO: 40 - protein, 23 aa, synthetic construct
  REGION 1..23: note = Description of Artificial Sequence: Syntheticpeptide
FQCNQCGASFTQKGNLLRHIKLH

SEQ ID NO: 41 - DNA, 78 bp, synthetic construct
  misc_feature 1..78: note = Description of Artificial Sequence: Syntheticoligonucleotide
  source 1..78: mol_type = other DNA
ggatcccgggctgactacaaagaccatgacggtgattataaagatcatgacatcgactacaaggatgacgatgacaag

SEQ ID NO: 42 - DNA, 21 bp, synthetic construct
  misc_feature 1..21: note = Description of Artificial Sequence: Syntheticoligonucleotide
  source 1..21: mol_type = other DNA
aggagcaccaggaacttgcca

SEQ ID NO: 43 - DNA, 21 bp, synthetic construct
  misc_feature 1..21: note = Description of Artificial Sequence: Syntheticoligonucleotide
  source 1..21: mol_type = other DNA
aagccgaaaaccacgatcatc

SEQ ID NO: 44 - DNA, 21 bp, synthetic construct
  misc_feature 1..21: note = Description of Artificial Sequence: Syntheticoligonucleotide
  source 1..21: mol_type = other DNA
gcgctaccgccgcctgcagaa

SEQ ID NO: 45 - DNA, 21 bp, synthetic construct
  misc_feature 1..21: note = Description of Artificial Sequence: Syntheticoligonucleotide
  source 1..21: mol_type = other DNA
tttcggcttggagtacatcgt

SEQ ID NO: 46 - DNA, 21 bp, synthetic construct
  misc_feature 1..21: note = Description of Artificial Sequence: Syntheticoligonucleotide
  source 1..21: mol_type = other DNA
ccggatgctgctgccgctacc

SEQ ID NO: 47 - DNA, 21 bp, synthetic construct
  misc_feature 1..21: note = Description of Artificial Sequence: Syntheticoligonucleotide
  source 1..21: mol_type = other DNA
tgctgccgctaccgaggatgg

SEQ ID NO: 48 - DNA, 50 bp, synthetic construct
  misc_feature 1..50: note = Description of Artificial Sequence: Syntheticoligonucleotide
  source 1..50: mol_type = other DNA
tcctcatcttggaattcgtgatgcgaacatcacgaattccaagatgagga

SEQ ID NO: 49 - DNA, 50 bp, synthetic construct
  misc_feature 1..50: note = Description of Artificial Sequence: Syntheticoligonucleotide
  source 1..50: mol_type = other DNA
cgccttactgggcatctctttctcgaaagaaagagatgcccagtaaggcg

SEQ ID NO: 50 - DNA, 46 bp, synthetic construct
  misc_feature 1..46: note = Description of Artificial Sequence: Syntheticoligonucleotide
  source 1..46: mol_type = other DNA
ctggtactactatgacagtatcgaaatactgtcatagtagtaccag

SEQ ID NO: 51 - DNA, 46 bp, synthetic construct
  misc_feature 1..46: note = Description of Artificial Sequence: Syntheticoligonucleotide
  source 1..46: mol_type = other DNA
aagtagcagaggagaagagctcgaaagctcttctcctctgctactt

SEQ ID NO: 52 - DNA, 46 bp, synthetic construct
  misc_feature 1..46: note = Description of Artificial Sequence: Syntheticoligonucleotide
  source 1..46: mol_type = other DNA
aagacagtcatccgctccatccgaagatggagcggatgactgtctt

SEQ ID NO: 53 - DNA, 46 bp, synthetic construct
  misc_feature 1..46: note = Description of Artificial Sequence: Syntheticoligonucleotide
  source 1..46: mol_type = other DNA
aaggacgtcattgagcagtaccgaagtactgctcaatgacgtcctt

SEQ ID NO: 54 - DNA, 46 bp, synthetic construct
  misc_feature 1..46: note = Description of Artificial Sequence: Syntheticoligonucleotide
  source 1..46: mol_type = other DNA
gccggatcaagagcctgcaaacgaatttgcaggctcttgatccggc

SEQ ID NO: 55 - DNA, 46 bp, synthetic construct
  misc_feature 1..46: note = Description of Artificial Sequence: Syntheticoligonucleotide
  source 1..46: mol_type = other DNA
ggtggatgaaatcagcatgatcgaaatcatgctgatttcatccacc

SEQ ID NO: 56 - DNA, 21 bp, synthetic construct
  misc_feature 1..21: note = Description of Artificial Sequence: Syntheticoligonucleotide
  source 1..21: mol_type = other DNA
ttgagaatcctgatggagcgg

SEQ ID NO: 57 - DNA, 19 bp, synthetic construct
  misc_feature 1..19: note = Description of Artificial Sequence: Syntheticoligonucleotide
  source 1..19: mol_type = other DNA
ttgagtctcagagatgccc

SEQ ID NO: 58 - DNA, 21 bp, synthetic construct
  misc_feature 1..21: note = Description of Artificial Sequence: Syntheticoligonucleotide
  source 1..21: mol_type = other DNA
ttctcgaagtgcttctgccgg

SEQ ID NO: 59 - DNA, 21 bp, synthetic construct
  misc_feature 1..21: note = Description of Artificial Sequence: Syntheticoligonucleotide
  source 1..21: mol_type = other DNA
ttctccaccttgaccacgcgt

SEQ ID NO: 60 - DNA, 21 bp, synthetic construct
  misc_feature 1..21: note = Description of Artificial Sequence: Syntheticoligonucleotide
  source 1..21: mol_type = other DNA
atactgtcatagtagtaccag

SEQ ID NO: 61 - DNA, 21 bp, synthetic construct
  misc_feature 1..21: note = Description of Artificial Sequence: Syntheticoligonucleotide
  source 1..21: mol_type = other DNA
tagtcggaggtgatgtcgggg

SEQ ID NO: 62 - DNA, 21 bp, synthetic construct
  misc_feature 1..21: note = Description of Artificial Sequence: Syntheticoligonucleotide
  source 1..21: mol_type = other DNA
ttgagaatcctgatggagcgg

SEQ ID NO: 63 - DNA, 21 bp, synthetic construct
  misc_feature 1..21: note = Description of Artificial Sequence: Syntheticoligonucleotide
  source 1..21: mol_type = other DNA
ttgagaatcctgatggagcgg

SEQ ID NO: 64 - DNA, 21 bp, synthetic construct
  misc_feature 1..21: note = Description of Artificial Sequence: Syntheticoligonucleotide
  source 1..21: mol_type = other DNA
ttgagaatcctgatggagcgg

SEQ ID NO: 65 - DNA, 21 bp, synthetic construct
  misc_feature 1..21: note = Description of Artificial Sequence: Syntheticoligonucleotide
  source 1..21: mol_type = other DNA
ttgagaatcctgatggagcgg

SEQ ID NO: 66 - DNA, 21 bp, synthetic construct
  misc_feature 1..21: note = Description of Artificial Sequence: Syntheticoligonucleotide
  source 1..21: mol_type = other DNA
ttgagaatcctgatggagcgg

SEQ ID NO: 67 - DNA, 21 bp, synthetic construct
  misc_feature 1..21: note = Description of Artificial Sequence: Syntheticoligonucleotide
  source 1..21: mol_type = other DNA
ttgagaatcctgatggagcgg

SEQ ID NO: 68 - DNA, 21 bp, synthetic construct
  misc_feature 1..21: note = Description of Artificial Sequence: Syntheticoligonucleotide
  source 1..21: mol_type = other DNA
ttgagaatcctgatggagcgg

SEQ ID NO: 69 - DNA, 21 bp, synthetic construct
  misc_feature 1..21: note = Description of Artificial Sequence: Syntheticoligonucleotide
  source 1..21: mol_type = other DNA
ttgagaatcctgatggagcgg

SEQ ID NO: 70 - DNA, 21 bp, synthetic construct
  misc_feature 1..21: note = Description of Artificial Sequence: Syntheticoligonucleotide
  source 1..21: mol_type = other DNA
ttgagaatcctgatggagcgg

SEQ ID NO: 71 - skipped

SEQ ID NO: 72 - RNA, 21 nt, synthetic construct
  misc_feature 1..21: note = Description of Artificial Sequence: Syntheticoligonucleotide
  source 1..21: mol_type = other RNA
ccgctccatcaggattctcaa

SEQ ID NO: 73 - RNA, 21 nt, synthetic construct
  misc_feature 1..21: note = Description of Artificial Sequence: Syntheticoligonucleotide
  source 1..21: mol_type = other RNA
ccgggcatctctgagactcaa

SEQ ID NO: 74 - RNA, 21 nt, synthetic construct
  misc_feature 1..21: note = Description of Artificial Sequence: Syntheticoligonucleotide
  source 1..21: mol_type = other RNA
ccggcagaagcacttcgagaa

SEQ ID NO: 75 - RNA, 21 nt, synthetic construct
  misc_feature 1..21: note = Description of Artificial Sequence: Syntheticoligonucleotide
  source 1..21: mol_type = other RNA
acgcgtggtcaaggtggagaa

SEQ ID NO: 76 - RNA, 21 nt, synthetic construct
  misc_feature 1..21: note = Description of Artificial Sequence: Syntheticoligonucleotide
  source 1..21: mol_type = other RNA
ctggtactactatgacagtat

SEQ ID NO: 77 - RNA, 21 nt, synthetic construct
  misc_feature 1..21: note = Description of Artificial Sequence: Syntheticoligonucleotide
  source 1..21: mol_type = other RNA
cccgacatcacctccgactac

SEQ ID NO: 78 - RNA, 21 nt, synthetic construct
  misc_feature 1..21: note = Description of Artificial Sequence: Syntheticoligonucleotide
  source 1..21: mol_type = other RNA
ccgttctgtcaggattctgaa

SEQ ID NO: 79 - RNA, 21 nt, synthetic construct
  misc_feature 1..21: note = Description of Artificial Sequence: Syntheticoligonucleotide
  source 1..21: mol_type = other RNA
ccgggcctctctaagactcaa

SEQ ID NO: 80 - RNA, 21 nt, synthetic construct
  misc_feature 1..21: note = Description of Artificial Sequence: Syntheticoligonucleotide
  source 1..21: mol_type = other RNA
caggcagaagcactttgagaa

SEQ ID NO: 81 - RNA, 21 nt, synthetic construct
  misc_feature 1..21: note = Description of Artificial Sequence: Syntheticoligonucleotide
  source 1..21: mol_type = other RNA
gcgcgtagtcaaggtggaaaa

SEQ ID NO: 82 - RNA, 21 nt, synthetic construct
  misc_feature 1..21: note = Description of Artificial Sequence: Syntheticoligonucleotide
  source 1..21: mol_type = other RNA
ctggtattactatgacagcat

SEQ ID NO: 83 - RNA, 21 nt, synthetic construct
  misc_feature 1..21: note = Description of Artificial Sequence: Syntheticoligonucleotide
  source 1..21: mol_type = other RNA
ccccgacatcacctcggacta

SEQ ID NO: 84 - RNA, 31 nt, synthetic construct
  misc_feature 1..31: note = Description of Artificial Sequence: Syntheticoligonucleotide
  source 1..31: mol_type = other RNA
atgatttccaccatcaggattctcccatgcc

SEQ ID NO: 85 - RNA, 31 nt, synthetic construct
  misc_feature 1..31: note = Description of Artificial Sequence: Syntheticoligonucleotide
  source 1..31: mol_type = other RNA
agcctcagggcatctctgagacacaggggca

SEQ ID NO: 86 - RNA, 31 nt, synthetic construct
  misc_feature 1..31: note = Description of Artificial Sequence: Syntheticoligonucleotide
  source 1..31: mol_type = other RNA
cagcacaggcagaagcactttgagaagaggc

SEQ ID NO: 87 - RNA, 31 nt, synthetic construct
  misc_feature 1..31: note = Description of Artificial Sequence: Syntheticoligonucleotide
  source 1..31: mol_type = other RNA
gacatctcagtggtcaaggtggaggacagct

SEQ ID NO: 88 - RNA, 31 nt, synthetic construct
  misc_feature 1..31: note = Description of Artificial Sequence: Syntheticoligonucleotide
  source 1..31: mol_type = other RNA
gccttgcggtactactatgacaagaacatca

SEQ ID NO: 89 - RNA, 31 nt, synthetic construct
  misc_feature 1..31: note = Description of Artificial Sequence: Syntheticoligonucleotide
  source 1..31: mol_type = other RNA
cagtggccgacatcacctccacctgccccac

SEQ ID NO: 90 - DNA, 2085 bp, Homo sapiens
  source 1..2085: mol_type = other DNA
atggccgaggcccccccgcgccgcctcggcctgggtcccccgcccggggacgccccccgcgcggagctagtggcgctcacggccgtgcagagcgaacagggcgaggcgggcgggggcggctccccgcgccgcctcggcctcctgggcagccccctgccgccgggcgcgcccctccctgggccgggctccggctcgggctccgcctgcggccagcgctcctcggccgcgcacaagcgctaccgccgcctgcagaactgggtctacaacgtgctggagcggccccgcggctgggccttcgtctaccacgtcttcatatttttgctggtcttcagctgcctggtgctgtctgtgctgtccactatccaggagcaccaggaacttgccaacgagtgtctcctcatcttggaattcgtgatgatcgtggttttcggcttggagtacatcgtccgggtctggtccgccggatgctgctgccgctaccgaggatggcagggtcgcttccgctttgccagaaagcccttctgtgtcatcgacttcatcgtgttcgtggcctcggtggccgtcatcgccgcgggtacccagggcaacatcttcgccacgtccgcgctgcgcagcatgcgcttcctgcagatcctgcgcatggtgcgcatggaccgccgcggcggcacctggaagctgctgggctcagtggtctacgcgcatagcaaggagctgatcaccgcctggtacatcgggttcctggtgctcatcttcgcctccttcctggtctacctggctgagaaggacgccaactccgacttctcctcctacgccgactcgctctggtgggggacgattacattgacaaccatcggctatggtgacaagacaccgcacacatggctgggcagggtcctggctgctggcttcgccttactgggcatctctttctttgccctgcctgccggcatcctaggctccggctttgccctgaaggtccaggagcagcaccggcagaagcacttcgagaagcggaggatgccggcagccaacctcatccaggctgcctggcgcctgtactccaccgatatgagccgggcctacctgacagccacctggtactactatgacagtatcctcccatccttcagagagctggccctcttgtttgagcacgtgcaacgggcccgcaatgggggcctacggcccctggaggtgcggcgggcgccggtacccgacggagcaccctcccgttacccgcccgttgccacctgccaccggccgggcagcacctccttctgccctggggaaagcagccggatgggcatcaaagaccgcatccgcatgggcagctcccagcggcggacgggtccttccaagcagcatctggcacctccaacaatgcccacctccccaagcagcgagcaggtgggtgaggccaccagccccaccaaggtgcaaaagagctggagcttcaatgaccgcacccgcttccgggcatctctgagactcaaaccccgcacctctgctgaggatgccccctcagaggaagtagcagaggagaagagctaccagtgtgagctcacggtggacgacatcatgcctgctgtgaagacagtcatccgctccatcaggattctcaagttcctggtggccaaaaggaaattcaaggagacactgcgaccgtacgacgtgaaggacgtcattgagcagtactcagcaggccacctggacatgctgggccggatcaagagcctgcaaactcgggtggaccaaattgtgggtcgggggcccggggacaggaaggcccgggagaagggcgacaaggggccctccgacgcggaggtggtggatgaaatcagcatgatgggacgcgtggtcaaggtggagaagcaggtgcagtccatcgagcacaagctggacctgctgttgggcttctattcgcgctgcctgcgctctggcacctcggccagcctgggcgccgtgcaagtgccgctgttcgaccccgacatcacctccgactaccacagccctgtggaccacgaggacatctccgtctccgcacagacgctcagcatctcccgctcggtcagcaccaacatggac

SEQ ID NO: 91 - DNA, 2088 bp, Mus musculus
  source 1..2088: mol_type = other DNA
atggccgaggcccccccgcgccgcctcggcctgggccccccgcccggggacgccccccgcgcggagttggtggcgctcacggccgtgcagagtgaacagggcgaggcgggcgggggcggctctccgcgtcgcctcggccttctgggcagccccctgccgccgggcgcgcccctccctgggccgggctccggctcgggctccgcctgcggcggccagcgctcctccgccgcgcagaagcgctaccgccgcctgcagaactgggtctacaacgtgctggagcggccccgcgggtgggccttcgtctaccacgtcttcatatttttgctagtcttcagctgcctggtgctgtctgtactgtccaccatccaggagcaccaggaacttgccaacgagtgtctccttatcttggaattcgtgatgattgtggtctttggcttggagtatataatccgtgtctggtcggccggatgctgttgtcgctacagaggatggcagggacgctttcgcttcgccaggaaacccttctgtgtcatcgacttcatcgtgttcgtggcctcggtggcagtgatagctgcgggcacacaaggcaacatctttgctacgtccgcgttgcgcagtatgcgcttcctacagatcctgcgcatggtgcgtatggatcgccgcggtggcacctggaagctgttgggatccgtggtctatgcgcacagtaaggagctgatcaccgcctggtacatcgggttcctggtgctcatctttgcctctttcctggtctacctggctgagaaggatgccaactctgacttctcctcctatgccgactcgctctggtgggggacgatcacactgacgaccattggctatggtgacaagacgccacatacatggctgggcagggttctggctgccggcttcgccttactgggcatctccttctttgccctgcctgccggcatcctgggctctggctttgccctgaaggtccaggagcagcacaggcagaagcactttgagaagcgcaggatgccagcagctaatctcatccaggctgcgtggcgcctgtactccacggacacaagccgggcctatttgacagccacctggtattactatgacagcattctcccatctttcagagagctggccctcttgtttgagcacatacaacgggcccgcaatgggggcttacggcccctggaggtgaggcgggcgccagtacctgatggagcgccctctcgctacccgcccgttgccacctgccaccggccaggcagtgcctccttctgccctggggaaagcagccggatgggcatcaaagaccgaatccgcataagcagctcccagaagcggacaggcccctccaagcagcatctggcccctccgccgattcccacctcgccaagcagtgagcaggtgggcgaggcatccagccccagcaaggtgcagaaaagctggagcttcaatgaccgcacccgcttccgggcctctctaagactcaagcctcgctgctctgctgaggagggcccctcagaggaagtggccgaggagaagagctaccagtgtgagcttacggtggatgatgtcatgcctgctgtgaagacggtcatccgttctgtcaggattctgaagttcctggtagccaaaaggaaattcaaggagacgctgcggccatatgatgtgaaggatgtcattgagcagtattcagcaggacacctggacatgctgggacgaatcaagagcctgcaagcccgggtggaccaaattgtgggtcggggccctggggaccgcaagactcgggagaagggcgataagggtccttcagacacggaggcagtggatgaaatcagcatgatggggcgcgtagtcaaggtggaaaagcaggtgcagtccatcgaacataagttggatctgctgctgggcttctactcgcgctgcctccgctctggcacctcggccagcctgggcactgtgcaagtgccgctcttcgaccccgacatcacctcggactaccacagccctgtagaccacgaggacatctctgtctccgcacagacgctcagcatctctcgctcagtcagcaccaacatggac

SEQ ID NO: 92 - protein, 696 aa, Mus musculus
MAEAPPRRLGLGPPPGDAPRAELVALTAVQSEQGEAGGGGSPRRLGLLGSPLPPGAPLPGPGSGSGSACGGQRSSAAQKRYRRLQNWVYNVLERPRGWAFVYHVFIFLLVFSCLVLSVLSTIQEHQELANECLLILEFVMIVVFGLEYIIRVWSAGCCCRYRGWQGRFRFARKPFCVIDFIVFVASVAVIAAGTQGNIFATSALRSMRFLQILRMVRMDRRGGTWKLLGSVVYAHSKELITAWYIGFLVLIFASFLVYLAEKDANSDFSSYADSLWWGTITLTTIGYGDKTPHTWLGRVLAAGFALLGISFFALPAGILGSGFALKVQEQHRQKHFEKRRMPAANLIQAAWRLYSTDTSRAYLTATWYYYDSILPSFRELALLFEHIQRARNGGLRPLEVRRAPVPDGAPSRYPPVATCHRPGSASFCPGESSRMGIKDRIRISSSQKRTGPSKQHLAPPPIPTSPSSEQVGEASSPSKVQKSWSFNDRTRFRASLRLKPRCSAEEGPSEEVAEEKSYQCELTVDDVMPAVKTVIRSVRILKFLVAKRKFKETLRPYDVKDVIEQYSAGHLDMLGRIKSLQARVDQIVGRGPGDRKTREKGDKGPSDTEAVDEISMMGRVVKVEKQVQSIEHKLDLLLGFYSRCLRSGTSASLGTVQVPLFDPDITSDYHSPVDHEDISVSAQTLSISRSVSTNMD

SEQ ID NO: 93 - RNA, 50 nt, synthetic construct
  misc_feature 1..50: note = Description of Artificial Sequence: Syntheticpolynucleotide
  variation 50: note = A residue can be repeated up to four thousand nine hundred fifty times
  source 1..50: mol_type = other RNA
aaaaaaaaaaaaaaaaaaaaaaaaaaaaaaaaaaaaaaaaaaaaaaaaaa

SEQ ID NO: 94 - DNA, 17 bp, synthetic construct
  misc_feature 1..17: note = Description of Artificial Sequence: Syntheticoligonucleotide
  source 1..17: mol_type = other DNA
aaataaaatacgaaatg

SEQ ID NO: 95 - DNA, 21 bp, synthetic construct
  misc_feature 1..21: note = Description of Artificial Sequence: Syntheticoligonucleotide
  source 1..21: mol_type = other DNA
ctggtactactatgacagtat

SEQ ID NO: 96 - DNA, 21 bp, synthetic construct
  misc_feature 1..21: note = Description of Artificial Sequence: Syntheticoligonucleotide
  source 1..21: mol_type = other DNA
ttgagtcttagagaggcccgg

SEQ ID NO: 97 - DNA, 21 bp, synthetic construct
  misc_feature 1..21: note = Description of Artificial Sequence: Syntheticoligonucleotide
  source 1..21: mol_type = other DNA
atgctgtcatagtaataccag

SEQ ID NO: 98 - DNA, 304 bp, synthetic construct
  misc_feature 1..304: note = Description of Artificial Sequence: Syntheticpolynucleotide
  source 1..304: mol_type = other DNA
cgttacataacttacggtaaatggcccgcctggctgaccgcccaacgacccccgcccattgacgtcaataatgacgtatgttcccatagtaacgccaatagggactttccattgacgtcaatgggtggagtatttacggtaaactgcccacttggcagtacatcaagtgtatcatatgccaagtacgccccctattgacgtcaatgacggtaaatggcccgcctggcattatgcccagtacatgaccttatgggactttcctacttggcagtacatctacgtattagtcatcgctattaccatg

SEQ ID NO: 99 - DNA, 219 bp, synthetic construct
  misc_feature 1..219: note = Description of Artificial Sequence: Syntheticpolynucleotide
  source 1..219: mol_type = other DNA
gtgatgcggttttggcagtacatcaatgggcgtggatagcggtttgactcacggggatttccaagtctccaccccattgacgtcaatgggagtttgttttggcaccaaaatcaacgggactttccaaaatgtcgtaacaactccgccccattgacgcaaatgggcggtaggcgtgtacggtgggaggtctatataagcagagctcgtttagtgaaccgt

SEQ ID NO: 100 - DNA, 234 bp, synthetic construct
  misc_feature 1..234: note = Description of Artificial Sequence: Syntheticpolynucleotide
  source 1..234: mol_type = other DNA
gtgatgcggttttggcagtacatcaatgggcgtggatagcggtttgactcacggggatttccaagtctccaccccattgacgtcaatgggagtttgttttggcaccaaaatcaacgggactttccaaaatgtcgtaacaactccgccccattgacgcaaatgggcggtaggcgtgtacggtgggaggtctatataagcagagctcgtttagtgaaccgtcgtttagtgaaccgt

SEQ ID NO: 101 - DNA, 277 bp, synthetic construct
  misc_feature 1..277: note = Description of Artificial Sequence: Syntheticpolynucleotide
  source 1..277: mol_type = other DNA
gtcgaggtgagccccacgttctgcttcactctccccatctcccccccctccccacccccaattttgtatttatttattttttaattattttgtgcagcgatgggggcggggggggggggggcgcgcgccaggcggggcggggcggggcgaggggcggggcggggcgaggcggagaggtgcggcggcagccaatcagagcggcgcgctccgaaagtttccttttatggcgaggcggcggcggcggcggccctataaaaagcgaagcgcgcggcgggcg

SEQ ID NO: 102 - DNA, 705 bp, synthetic construct
  misc_feature 1..705: note = Description of Artificial Sequence: Syntheticpolynucleotide
  source 1..705: mol_type = other DNA
ggagtcgctgcgttgccttcgccccgtgccccgctccgcgccgcctcgcgccgcccgccccggctctgactgaccgcgttactcccacaggtgagcgggcgggacggcccttctcctccgggctgtaattagcgcttggtttaatgacggctcgtttcttttctgtggctgcgtgaaagccttaaagggctccgggagggccctttgtgcgggggggagcggctcggggggtgcgtgcgtgtgtgtgtgcgtggggagcgccgcgtgcggcccgcgctgcccggcggctgtgagcgctgcgggcgcggcgcggggctttgtgcgctccgcgtgtgcgcgaggggagcgcggccgggggcggtgccccgcggtgcgggggggctgcgaggggaacaaaggctgcgtgcggggtgtgtgcgtgggggggtgagcagggggtgtgggcgcggcggtcgggctgtaacccccccctgcacccccctccccgagttgctgagcacggcccggcttcgggtgcggggctccgtgcggggcgtggcgcggggctcgccgtgccgggcggggggtggcggcaggtgggggtgccgggcggggcggggccgcctcgggccggggagggctcgggggaggggcgcggcggcccccggagcgccggcgtctagagcctctgctaaccatgttcatgccttcttctttttcctacag

SEQ ID NO: 103 - DNA, 720 bp, synthetic construct
  misc_feature 1..720: note = Description of Artificial Sequence: Syntheticpolynucleotide
  source 1..720: mol_type = other DNA
atggtgagcaagggcgaggagctgttcaccggggtggtgcccatcctggtcgagctggacggcgacgtaaacggccacaagttcagcgtgtccggcgagggcgagggcgatgccacctacggcaagctgaccctgaagttcatctgcaccaccggcaagctgcccgtgccctggcccaccctcgtgaccaccctgacctacggcgtgcagtgcttcagccgctaccccgaccacatgaagcagcacgacttcttcaagtccgccatgcccgaaggctacgtccaggagcgcaccatcttcttcaaggacgacggcaactacaagacccgcgccgaggtgaagttcgagggcgacaccctggtgaaccgcatcgagctgaagggcatcgacttcaaggaggacggcaacatcctggggcacaagctggagtacaactacaacagccacaacgtctatatcatggccgacaagcagaagaacggcatcaaggtgaacttcaagatccgccacaacatcgaggacggcagcgtgcagctcgccgaccactaccagcagaacacccccatcggcgacggccccgtgctgctgcccgacaaccactacctgagcacccagtccgccctgagcaaagaccccaacgagaagcgcgatcacatggtcctgctggagttcgtgaccgccgccgggatcactctcggcatggacgagctgtacaagtaa

SEQ ID NO: 104 - DNA, 127 bp, synthetic construct
  misc_feature 1..127: note = Description of Artificial Sequence: Syntheticpolynucleotide
  source 1..127: mol_type = other DNA
catagctcttatgatagcaatgtcagcagtgcctttgagtctcagagatgcccgggttaagattctaaaattatcacgggtattacttgaggctcagaagtaaggttgaccatactctacagttgtg

SEQ ID NO: 105 - DNA, 146 bp, synthetic construct
  misc_feature 1..146: note = Description of Artificial Sequence: Syntheticpolynucleotide
  source 1..146: mol_type = other DNA
gagcaggaggaccaaggccctggcgaaggccgtggcctcgttgagtctcagagatgcccggtgtgcaggtcccaatggccgggtattactgagattccacggggacgcgggcctggacgccggcatccgggctcaggacccccctc

SEQ ID NO: 106 - DNA, 148 bp, synthetic construct
  misc_feature 1..148: note = Description of Artificial Sequence: Syntheticpolynucleotide
  source 1..148: mol_type = other DNA
gtgtccccagagagcccgcaccagtgccatctgcttggccgatttgagtctcagagatgcccggcttgtgtctctccgctctgagctgtctgtctcgaggctcatatgggaaaagcaggacccgcagctgcgtccgcctcccctgcat

SEQ ID NO: 107 - DNA, 127 bp, synthetic construct
  misc_feature 1..127: note = Description of Artificial Sequence: Syntheticpolynucleotide
  source 1..127: mol_type = other DNA
catagctcttatgatagcaatgtcagcagtgcctttctcgaagtgcttctgccgggttaagattctaaaattatcacggtagaaacatcttcgggagaagtaaggttgaccatactctacagttgtg

SEQ ID NO: 108 - DNA, 146 bp, synthetic construct
  misc_feature 1..146: note = Description of Artificial Sequence: Syntheticpolynucleotide
  source 1..146: mol_type = other DNA
gagcaggaggaccaaggccctggcgaaggccgtggcctcgttctcgaagtgcttctgccggtgtgcaggtcccaatggccggtagaatcgtttcgagcacggggacgcgggcctggacgccggcatccgggctcaggacccccctc

SEQ ID NO: 109 - DNA, 148 bp, synthetic construct
  misc_feature 1..148: note = Description of Artificial Sequence: Syntheticpolynucleotide
  source 1..148: mol_type = other DNA
gtgtccccagagagcccgcaccagtgccatctgcttggccgatttctcgaagtgcttctgccggcttgtgtctctccgctctgagctgtgaggagctttcgggatatgggaaaagcaggacccgcagctgcgtccgcctcccctgcat

SEQ ID NO: 110 - DNA, 127 bp, synthetic construct
  misc_feature 1..127: note = Description of Artificial Sequence: Syntheticpolynucleotide
  source 1..127: mol_type = other DNA
catagctcttatgatagcaatgtcagcagtgcctttctccaccttgaccacgcgtgttaagattctaaaattatctcgtgtggtaagtggtggagagaagtaaggttgaccatactctacagttgtg

SEQ ID NO: 111 - DNA, 146 bp, synthetic construct
  misc_feature 1..146: note = Description of Artificial Sequence: Syntheticpolynucleotide
  source 1..146: mol_type = other DNA
gagcaggaggaccaaggccctggcgaaggccgtggcctcgttctccaccttgaccacgcgttgtgcaggtcccaatgggcgtgtggtagaggtggagcacggggacgcgggcctggacgccggcatccgggctcaggacccccctc

SEQ ID NO: 112 - DNA, 148 bp, synthetic construct
  misc_feature 1..148: note = Description of Artificial Sequence: Syntheticpolynucleotide
  source 1..148: mol_type = other DNA
gtgtccccagagagcccgcaccagtgccatctgcttggccgatttctccaccttgaccacgcgtcttgtgtctctccgctctgaggtgactggttgggtggagatatgggaaaagcaggacccgcagctgcgtccgcctcccctgcat

SEQ ID NO: 113 - DNA, 127 bp, synthetic construct
  misc_feature 1..127: note = Description of Artificial Sequence: Syntheticpolynucleotide
  source 1..127: mol_type = other DNA
catagctcttatgatagcaatgtcagcagtgcctatactgtcatagtagtaccaggttaagattctaaaattatcatggtactaatgttggcagtgtaagtaaggttgaccatactctacagttgtg

SEQ ID NO: 114 - DNA, 146 bp, synthetic construct
  misc_feature 1..146: note = Description of Artificial Sequence: Syntheticpolynucleotide
  source 1..146: mol_type = other DNA
gagcaggaggaccaaggccctggcgaaggccgtggcctcgatactgtcatagtagtaccagtgtgcaggtcccaatggctggtactaatgtgacagtctcggggacgcgggcctggacgccggcatccgggctcaggacccccctc

SEQ ID NO: 115 - DNA, 148 bp, synthetic construct
  misc_feature 1..148: note = Description of Artificial Sequence: Syntheticpolynucleotide
  source 1..148: mol_type = other DNA
gtgtccccagagagcccgcaccagtgccatctgcttggccgatatactgtcatagtagtaccagcttgtgtctctccgctctgagctgtcactgcttgacggtaaatgggaaaagcaggacccgcagctgcgtccgcctcccctgcat

SEQ ID NO: 116 - DNA, 133 bp, synthetic construct
  misc_feature 1..133: note = Description of Artificial Sequence: Syntheticpolynucleotide
  source 1..133: mol_type = other DNA
tcctctgagtgctgaaggcttgctgtaggctgtatgctgttgagaatcctgatggagcgggtttttgcctccaactgacccgctcataggattctcaacagtgtatgatgcctgttactagcattcacatgga

SEQ ID NO: 117 - DNA, 133 bp, synthetic construct
  misc_feature 1..133: note = Description of Artificial Sequence: Syntheticpolynucleotide
  source 1..133: mol_type = other DNA
tcctctgagtgctgaaggcttgctgtaggctgtatgctgttgagtctcagagatgcccgggtttttgcctccaactgactcgggattctgagactcaacagtgtatgatgcctgttactagcattcacatgga

SEQ ID NO: 118 - DNA, 133 bp, synthetic construct
  misc_feature 1..133: note = Description of Artificial Sequence: Syntheticpolynucleotide
  source 1..133: mol_type = other DNA
tcctctgagtgctgaaggcttgctgtaggctgtatgctgttgagtctcagagatgcccgggtttttgcctccaactgactcgggattctgagattcaacagtgtatgatgcctgttactagcattcacatgga

SEQ ID NO: 119 - DNA, 133 bp, synthetic construct
  misc_feature 1..133: note = Description of Artificial Sequence: Syntheticpolynucleotide
  source 1..133: mol_type = other DNA
tcctctgagtgctgaaggcttgctgtaggctgtatgctgttgagtctcagagatgcccgggtttttgcctccaactgactcgggatcctgagattcaacagtgtatgatgcctgttactagcattcacatgga

SEQ ID NO: 120 - DNA, 133 bp, synthetic construct
  misc_feature 1..133: note = Description of Artificial Sequence: Syntheticpolynucleotide
  source 1..133: mol_type = other DNA
tcctctgagtgctgaaggcttgctgtaggctgtatgctgttgagtctcagagatgcccggaagtttgcctccaactctttcgggatcctgagattcaacagtgtatgatgcctgttactagcattcacatgga

SEQ ID NO: 121 - DNA, 133 bp, synthetic construct
  misc_feature 1..133: note = Description of Artificial Sequence: Syntheticpolynucleotide
  source 1..133: mol_type = other DNA
tcctctgagtgctgaaggcttgctgtaggctgtatgctgttctcgaagtgcttctgccgggtttttgcctccaactgactcggcgaatacttcgagaacagtgtatgatgcctgttactagcattcacatgga

SEQ ID NO: 122 - DNA, 133 bp, synthetic construct
  misc_feature 1..133: note = Description of Artificial Sequence: Syntheticpolynucleotide
  source 1..133: mol_type = other DNA
tcctctgagtgctgaaggcttgctgtaggctgtatgctgttctccaccttgaccacgcgtgtttttgcctccaactgacatgtgggtaaggtggagaacagtgtatgatgcctgttactagcattcacatgga

SEQ ID NO: 123 - DNA, 133 bp, synthetic construct
  misc_feature 1..133: note = Description of Artificial Sequence: Syntheticpolynucleotide
  source 1..133: mol_type = other DNA
tcctctgagtgctgaaggcttgctgtaggctgtatgctgatactgtcatagtagtaccaggtttttgcctccaactgacctggtctatatgacagtatcagtgtatgatgcctgttactagcattcacatgga

SEQ ID NO: 124 - DNA, 133 bp, synthetic construct
  misc_feature 1..133: note = Description of Artificial Sequence: Syntheticpolynucleotide
  source 1..133: mol_type = other DNA
tcctctgagtgctgaaggcttgctgtaggctgtatgctgtagtcggaggtgatgtcgggggtttttgcctccaactgactcctgcataccttcgattacagtgtatgatgcctgttactagcattcacatgga

SEQ ID NO: 125 - DNA, 127 bp, synthetic construct
  misc_feature 1..127: note = Description of Artificial Sequence: Syntheticpolynucleotide
  source 1..127: mol_type = other DNA
catagctcttatgatagcaatgtcagcagtgcctttgagaatcctgatggagcgggttaagattctaaaattatcacgctccatgagtgattctcagaagtaaggttgaccatactctacagttgtg

SEQ ID NO: 126 - DNA, 146 bp, synthetic construct
  misc_feature 1..146: note = Description of Artificial Sequence: Syntheticpolynucleotide
  source 1..146: mol_type = other DNA
gagcaggaggaccaaggccctggcgaaggccgtggcctcgttgagaatcctgatggagcggtgtgcaggtcccaatggccgctccataaggattctccacggggacgcgggcctggacgccggcatccgggctcaggacccccctc

SEQ ID NO: 127 - DNA, 148 bp, synthetic construct
  misc_feature 1..148: note = Description of Artificial Sequence: Syntheticpolynucleotide
  source 1..148: mol_type = other DNA
gtgtccccagagagcccgcaccagtgccatctgcttggccgatttgagaatcctgatggagcggcttgtgtctctccgctctgagccgggccatcagattctcatatgggaaaagcaggacccgcagctgcgtccgcctcccctgcat

SEQ ID NO: 128 - DNA, 147 bp, synthetic construct
  misc_feature 1..147: note = Description of Artificial Sequence: Syntheticpolynucleotide
  source 1..147: mol_type = other DNA
tgaagttaacaccttcgtggctacagagtttccttagcagagctgttgagaatcctgatggagcgggtgtctaaactatcccgctccatccggattctacatagctactgctaggcaatccttccctcgataaatgtcttggcatcg

SEQ ID NO: 129 - DNA, 121 bp, synthetic construct
  misc_feature 1..121: note = Description of Artificial Sequence: Syntheticpolynucleotide
  source 1..121: mol_type = other DNA
gccgctggacccctccactctgctgtggccttgagaatcctgatggagcgggattgctgtcccaaactcccgctccatcggattctcaaggctacagtgaggggcgagctccttctcctgc

SEQ ID NO: 130 - DNA, 149 bp, synthetic construct
  misc_feature 1..149: note = Description of Artificial Sequence: Syntheticpolynucleotide
  source 1..149: mol_type = other DNA
ctccccagctcctggggggagctgcttgcctccccccgttttgagaatcctgatggagcggactggtgaggtaacaggatccgccgtccatctttattctcactatggggcgaggactcagccggcaccctgtgcacagccagcgaggg

SEQ ID NO: 131 - DNA, 140 bp, synthetic construct
  misc_feature 1..140: note = Description of Artificial Sequence: Syntheticpolynucleotide
  source 1..140: mol_type = other DNA
agggtcggcaggccgcagagtgtgactcctgttctgtgtttgagaatcctgatggagcgggtgaacagtctcagtcccgctcccaggaaatggtcaaaaacagagcagagacagatccacgagggcctccggagcacctt

SEQ ID NO: 132 - DNA, 123 bp, synthetic construct
  misc_feature 1..123: note = Description of Artificial Sequence: Syntheticpolynucleotide
  source 1..123: mol_type = other DNA
gaaacagattggaaatgatttgttttgagcgggggttgagaatcctgatggagcgggtttgtcataaaccccgctccctcaggattcccaacctcctctcatttgctatattcaattaagtaa

SEQ ID NO: 133 - DNA, 102 bp, synthetic construct
  misc_feature 1..102: note = Description of Artificial Sequence: Syntheticpolynucleotide
  source 1..102: mol_type = other DNA
tgactgccagggcacttgggaatggcaaggttgagaatcctgatggagcggattccatcaggattctcagtcttgctatacccagaaaacgtgccaggaaga

SEQ ID NO: 134 - DNA, 149 bp, synthetic construct
  misc_feature 1..149: note = Description of Artificial Sequence: Syntheticpolynucleotide
  source 1..149: mol_type = other DNA
cctgcaggcgccggcgtcctctgagtgctgaaggcttgctgtaggctgtatgctgttgagaatcctgatggagcgggtttttgcctccaactgacccgctcataggattctcaacagtgtatgatgcctgttactagcattcacatgga

SEQ ID NO: 135 - DNA, 146 bp, synthetic construct
  misc_feature 1..146: note = Description of Artificial Sequence: Syntheticpolynucleotide
  source 1..146: mol_type = other DNA
gagcaggaggaccaaggccctggcgaaggccgtggcctcgatgctgtcatagtaataccagtgtgcaggtcccaatggctggtattaatgtgacagtctcggggacgcgggcctggacgccggcatccgggctcaggacccccctc

SEQ ID NO: 136 - DNA, 146 bp, synthetic construct
  misc_feature 1..146: note = Description of Artificial Sequence: Syntheticpolynucleotide
  source 1..146: mol_type = other DNA
gagcaggaggaccaaggccctggcgaaggccgtggcctcgttgagtcttagagaggcccggtgtgcaggtcccaatggccgggtcttactgagattccacggggacgcgggcctggacgccggcatccgggctcaggacccccctc

SEQ ID NO: 137 - DNA, 146 bp, synthetic construct
  misc_feature 1..146: note = Description of Artificial Sequence: Syntheticpolynucleotide
  source 1..146: mol_type = other DNA
gagcaggaggaccaaggccctggcgaaggccgtggcctcgttttccaccttgactacgcgctgtgcaggtcccaatgggcgtgtagtagaggtggagcacggggacgcgggcctggacgccggcatccgggctcaggacccccctc

SEQ ID NO: 138 - DNA, 249 bp, synthetic construct
  misc_feature 1..249: note = Description of Artificial Sequence: Syntheticpolynucleotide
  source 1..249: mol_type = other DNA
gtggcctcgatgctgtcatagtaataccagtgtgcaggtcccaatggctggtattaatgtgacagtctcggggacgcgcaattgggtggcctcgatgctgtcatagtaataccagtgtgcaggtcccaatggctggtattaatgtgacagtctcggggacgcgggcgcgcccgtggcctcgatgctgtcatagtaataccagtgtgcaggtcccaatggctggtattaatgtgacagtctcggggacgc

SEQ ID NO: 139 - DNA, 247 bp, synthetic construct
  misc_feature 1..247: note = Description of Artificial Sequence: Syntheticpolynucleotide
  source 1..247: mol_type = other DNA
gtggcctcgttgagtcttagagaggcccggtgtgcaggtcccaatggccgggtcttactgagattccacggggacgcgggatccggtggcctcgttgagtcttagagaggcccggtgtgcaggtcccaatggccgggtcttactgagattccacggggacgcgggtacccgtggcctcgttgagtcttagagaggcccggtgtgcaggtcccaatggccgggtcttactgagattccacggggacgc

SEQ ID NO: 140 - DNA, 1650 bp, synthetic construct
  misc_feature 1..1650: note = Description of Artificial Sequence: Syntheticpolynucleotide
  source 1..1650: mol_type = other DNA
atggaagatgccaaaaacattaagaagggcccagcgccattctacccactcgaagacgggaccgccggcgagcagctgcacaaagccatgaagcgctacgccctggtgcccggcaccatcgcctttaccgacgcacatatcgaggtggacattacctacgccgagtacttcgagatgagcgttcggctggcagaagctatgaagcgctatgggctgaatacaaaccatcggatcgtggtgtgcagcgagaatagcttgcagttcttcatgcccgtgttgggtgccctgttcatcggtgtggctgtggccccagctaacgacatctacaacgagcgcgagctgctgaacagcatgggcatcagccagcccaccgtcgtattcgtgagcaagaaagggctgcaaaagatcctcaacgtgcaaaagaagctaccgatcatacaaaagatcatcatcatggatagcaagaccgactaccagggcttccaaagcatgtacaccttcgtgacttcccatttgccacccggcttcaacgagtacgacttcgtgcccgagagcttcgaccgggacaaaaccatcgccctgatcatgaacagtagtggcagtaccggattgcccaagggcgtagccctaccgcaccgcaccgcttgtgtccgattcagtcatgcccgcgaccccatcttcggcaaccagatcatccccgacaccgctatcctcagcgtggtgccatttcaccacggcttcggcatgttcaccacgctgggctacttgatctgcggctttcgggtcgtgctcatgtaccgcttcgaggaggagctattcttgcgcagcttgcaagactataagattcaatctgccctgctggtgcccacactatttagcttcttcgctaagagcactctcatcgacaagtacgacctaagcaacttgcacgagatcgccagcggcggggcgccgctcagcaaggaggtaggtgaggccgtggccaaacgcttccacctaccaggcatccgccagggctacggcctgacagaaacaaccagcgccattctgatcacccccgaaggggacgacaagcctggcgcagtaggcaaggtggtgcccttcttcgaggctaaggtggtggacttggacacaggtaagacactgggtgtgaaccagcgcggcgagctgtgcgtccgtggccccatgatcatgagcggctacgttaacaaccccgaggctacaaacgctctcatcgacaaggacggctggctgcacagcggcgacatcgcctactgggacgaggacgagcacttcttcatcgtggaccggctgaagagcctgatcaaatacaagggctaccaggtagccccagccgaactggagagcatcctgctgcaacaccccaacatcttcgacgccggggtcgccggcctgcccgacgacgatgccggcgagctgcccgccgcagtcgtcgtgctggaacacggtaaaaccatgaccgagaaggagatcgtggactatgtggccagccaggttacaaccgccaagaagctgcgcggtggtgttgtgttcgtggacgaggtgcctaaaggactgaccggcaagttggacgcccgcaagatccgcgagattctcattaaggccaagaagggcggcaagatcgccgtg

SEQ ID NO: 141 - DNA, 54 bp, synthetic construct
  misc_feature 1..54: note = Description of Artificial Sequence: Syntheticoligonucleotide
  source 1..54: mol_type = other DNA
gagggcagaggaagtctgctaacatgcggtgacgtcgaggagaatcctggccca

SEQ ID NO: 142 - DNA, 699 bp, synthetic construct
  misc_feature 1..699: note = Description of Artificial Sequence: Syntheticpolynucleotide
  source 1..699: mol_type = other DNA
atggagagcgacgagagcggcctgcccgccatggagatcgagtgccgcatcaccggcaccctgaacggcgtggagttcgagctggtgggcggcggagagggcacccccgagcagggccgcatgaccaacaagatgaagagcaccaaaggcgccctgaccttcagcccctacctgctgagccacgtgatgggctacggcttctaccacttcggcacctaccccagcggctacgagaaccccttcctgcacgccatcaacaacggcggctacaccaacacccgcatcgagaagtacgaggacggcggcgtgctgcacgtgagcttcagctaccgctacgaggccggccgcgtgatcggcgacttcaaggtgatgggcaccggcttccccgaggacagcgtgatcttcaccgacaagatcatccgcagcaacgccaccgtggagcacctgcaccccatgggcgataacgatctggatggcagcttcacccgcaccttcagcctgcgcgacggcggctactacagctccgtggtggacagccacatgcacttcaagagcgccatccaccccagcatcctgcagaacgggggccccatgttcgccttccgccgcgtggaggaggatcacagcaacaccgagctgggcatcgtggagtaccagcacgccttcaagaccccggatgcagatgccggtgaagaataa

SEQ ID NO: 143 - DNA, 122 bp, synthetic construct
  misc_feature 1..122: note = Description of Artificial Sequence: Syntheticpolynucleotide
  source 1..122: mol_type = other DNA
taagatacattgatgagtttggacaaaccacaactagaatgcagtgaaaaaaatgctttatttgtgaaatttgtgatgctattgctttatttgtaaccattataagctgcaataaacaagtt

SEQ ID NO: 144 - DNA, 265 bp, synthetic construct
  misc_feature 1..265: note = Description of Artificial Sequence: Syntheticpolynucleotide
  source 1..265: mol_type = other DNA
aaggtcgggcaggaagagggcctatttcccatgattccttcatatttgcatatacgatacaaggctgttagagagataattagaattaatttgactgtaaacacaaagatattagtacaaaatacgtgacgtagaaagtaataatttcttgggtagtttgcagttttaaaattatgttttaaaatggactatcatatgcttaccgtaacttgaaagtatttcgatttcttggctttatatatcttgtggaaaggacgaaacaccg

SEQ ID NO: 145 - DNA, 66 bp, synthetic construct
  misc_feature 1..66: note = Description of Artificial Sequence: Syntheticoligonucleotide
  source 1..66: mol_type = other DNA
gactacaaagaccatgacggtgattataaagatcatgacatcgactacaaggatgacgatgacaag

SEQ ID NO: 146 - DNA, 699 bp, synthetic construct
  misc_feature 1..699: note = Description of Artificial Sequence: Syntheticpolynucleotide
  source 1..699: mol_type = other DNA
atggtgagcaagggcgaggcagtgatcaaggagttcatgcggttcaaggtgcacatggagggctccatgaacggccacgagttcgagatcgagggcgagggcgagggccgcccctacgagggcacccagaccgccaagctgaaggtgaccaagggtggccccctgcccttctcctgggacatcctgtcccctcagttcatgtacggctccagggccttcatcaagcaccccgccgacatccccgactactataagcagtccttccccgagggcttcaagtgggagcgcgtgatgaacttcgaggacggcggcgccgtgaccgtgacccaggacacctccctggaggacggcaccctgatctacaaggtgaagctccgcggcaccaacttccctcctgacggccccgtaatgcagaagaagacaatgggctgggaagcgtccaccgagcggttgtaccccgaggacggcgtgctgaagggcgacattaagatggccctgcgcctgaaggacggcggccgctacctggcggacttcaagaccacctacaaggccaagaagcccgtgcagatgcccggcgcctacaacgtcgaccgcaagttggacatcacctcccacaacgaggactacaccgtggtggaacagtacgaacgctccgagggccgccactccaccggcggcatggacgagctgtacaagtaa

SEQ ID NO: 147 - DNA, 86 bp, synthetic construct
  misc_feature 1..86: note = Description of Artificial Sequence: Syntheticoligonucleotide
  source 1..86: mol_type = other DNA
gtttaagtactctgtgctggaaacagcacagaatctacttaaacaaggcaaaatgccgtgtttatctcgtcaacttgttggcgaga

SEQ ID NO: 148 - DNA, 149 bp, synthetic construct; identical to SEQ ID NO: 130
  misc_feature 1..149: note = Description of Artificial Sequence: Syntheticpolynucleotide
  source 1..149: mol_type = other DNA

SEQ ID NO: 149 - skipped

SEQ ID NO: 150 - DNA, 21 bp, synthetic construct
  misc_feature 1..21: note = Description of Artificial Sequence: Syntheticoligonucleotide
  source 1..21: mol_type = other DNA
aagccaaagaccacaatcatc

SEQ ID NO: 151 - DNA, 27 bp, synthetic construct
  misc_feature 1..27: note = Description of Artificial Sequence: Syntheticoligonucleotide
  source 1..27: mol_type = other DNA
atggcccctaagaagaagcggaaagtc

SEQ ID NO: 152 - DNA, 3156 bp, synthetic construct
  misc_feature 1..3156: note = Description of Artificial Sequence: Syntheticpolynucleotide
  source 1..3156: mol_type = other DNA
aagcggaactatatcctgggcctcgccatcggcatcaccagcgttggctacggcatcatcgactacgagacacgggacgtgatcgatgccggcgtgcggctgtttaaagaggccaacgtcgagaacaacgagggccgcagatctaagagaggcgccagacggctgaagcggagaagaaggcacagaatccagagagtgaagaagctgctgttcgactacaacctgctgaccgaccacagcgagctgagcggcatcaatccttacgaggccagagtgaagggcctgagccagaagctgagcgaggaagagtttagcgccgctctgctgcacctggccaagagaagaggcgtgcacaacgtgaacgaggtggaagaggacaccggcaacgagctgtccaccaaagagcagatcagccggaacagcaaggccctggaagagaaatacgtggccgaactgcagctggaacggctgaaaaaggatggcgaagtgcggggcagcatcaatcggttcaagaccagcgactacgtgaaagaagccaaacagctgctgaaggtgcagaaggcctaccaccagctggaccagagcttcatcgacacctacatcgacctgctggaaacccggcggacctactatgaaggacctggcgagggaagccccttcggctggaaggacatcaaagaatggtacgagatgctgatgggccactgcacctactttcccgaggaactgcggagcgtgaagtacgcctacaacgccgacctgtacaacgccctgaacgacctgaacaacctcgtgatcacccgggacgagaacgagaagctggaatattacgagaagttccagatcatcgagaacgtgttcaagcagaagaagaaacccacgctgaagcagatcgccaaagagatcctggtcaacgaggaagatatcaagggctacagagtgaccagcaccggcaagcccgagttcaccaacctgaaggtgtaccacgacatcaaggatatcacagcccggaaagagattattgagaacgccgagctgctggaccaaatcgccaagatcctgaccatctaccagagcagcgaggacatccaagaggaactgaccaatctgaactccgagctgacccaagaagagatcgagcagatctctaatctgaaggggtacaccggcacacacaacctgagcctgaaggccatcaacctgatcctggacgagctgtggcacaccaacgacaaccagattgccatcttcaacaggctgaagctggtgcccaagaaggtggacctgtctcagcagaaagaaatccccaccacactggtggacgacttcattctgagccccgtggtcaagaggagcttcatccagagcatcaaagtgatcaacgccatcatcaagaagtacgggctgcccaacgatatcatcatcgagctggcccgcgagaagaactccaaggacgcccagaaaatgatcaacgagatgcagaagaggaaccgccagaccaacgagcggatcgaggaaatcatccggaccaccggcaaagagaacgccaagtacctgatcgagaagatcaagctgcacgacatgcaagagggcaagtgcctgtacagcctggaagccattcctctggaagatctgctgaacaatcccttcaactatgaggtggaccacatcatccccagaagcgtgtccttcgacaacagcttcaacaacaaggtgctcgtgaagcaagaggaagccagcaagaagggcaacagaaccccattccagtacctgagcagcagcgacagcaagatcagctacgaaaccttcaagaagcacatcctgaatctggccaaaggcaagggcagaatcagcaagaccaagaaagaatacctgctcgaggaacgggacatcaacagattcagcgtgcagaaagacttcatcaatcggaacctggtggacaccagatacgccaccagaggcctgatgaatctgctgcggagctacttcagagtgaacaatctggacgtgaaagtcaagtccatcaacggcggcttcaccagctttctgcggcggaagtggaagttcaagaaagagcggaacaagggctataagcaccacgccgaggacgccctgatcattgccaacgccgatttcatcttcaaagagtggaagaaactggacaaggccaaaaaagtgatggaaaaccagatgttcgaggaaaagcaggccgagagcatgcccgagatcgaaaccgagcaagagtacaaagagattttcatcacgccccaccagatcaagcacattaaggacttcaaggactacaagtacagccaccgcgtggacaagaagcccaatagagagctgattaacgacaccctgtactctacccggaaggacgacaagggcaataccctgatcgtcaacaacctgaacggcctgtacgacaaggacaacgacaagctcaagaagctgatcaacaagagccccgagaaactgctgatgtaccaccacgatcctcagacctaccagaaactgaagctcatcatggaacagtacggcgacgagaagaatcccctgtacaagtactacgaggaaaccgggaactacctgaccaagtactccaaaaaggacaatgggcccgtgatcaagaagattaagtattacggcaacaagctgaatgcccacctggacatcaccgacgactaccccaacagcagaaacaaggtggtcaagctgtccctgaagccttacagattcgacgtgtacctggacaacggcgtgtacaagttcgtgaccgtgaagaacctggacgtcatcaaaaaagaaaactactacgaagtcaacagcaagtgctatgaggaagccaagaaactcaagaaaatcagcaaccaggccgagtttatcgcctccttctacaacaacgatctgatcaagatcaacggggagctgtatagagtgatcggcgtgaacaatgacctgctgaaccggatcgaagtgaacatgatcgacatcacctaccgcgagtacctcgagaacatgaacgataagcggcctccacggatcattaagacaatcgccagcaagacgcagagcattaagaagtacagcacagacatcctgggcaacctgtacgaagtgaagtctaagaagcacccgcagattatcaagaaaggc

SEQ ID NO: 153 - DNA, 21 bp, synthetic construct
  misc_feature 1..21: note = Description of Artificial Sequence: Syntheticoligonucleotide
  source 1..21: mol_type = other DNA
cccaagaaaaaacggaaggtt

SEQ ID NO: 154 - DNA, 3156 bp, synthetic construct
  misc_feature 1..3156: note = Description of Artificial Sequence: Syntheticpolynucleotide
  source 1..3156: mol_type = other DNA
aagcggaactatatcctgggcctcgacatcggcatcaccagcgttggctacggcatcatcgactacgagacacgggacgtgatcgatgccggcgtgcggctgtttaaagaggccaacgtcgagaacaacgagggccgcagatctaagagaggcgccagacggctgaagcggagaagaaggcacagaatccagagagtgaagaagctgctgttcgactacaacctgctgaccgaccacagcgagctgagcggcatcaatccttacgaggccagagtgaagggcctgagccagaagctgagcgaggaagagtttagcgccgctctgctgcacctggccaagagaagaggcgtgcacaacgtgaacgaggtggaagaggacaccggcaacgagctgtccaccaaagagcagatcagccggaacagcaaggccctggaagagaaatacgtggccgaactgcagctggaacggctgaaaaaggatggcgaagtgcggggcagcatcaatcggttcaagaccagcgactacgtgaaagaagccaaacagctgctgaaggtgcagaaggcctaccaccagctggaccagagcttcatcgacacctacatcgacctgctggaaacccggcggacctactatgaaggacctggcgagggaagccccttcggctggaaggacatcaaagaatggtacgagatgctgatgggccactgcacctactttcccgaggaactgcggagcgtgaagtacgcctacaacgccgacctgtacaacgccctgaacgacctgaacaacctcgtgatcacccgggacgagaacgagaagctggaatattacgagaagttccagatcatcgagaacgtgttcaagcagaagaagaaacccacgctgaagcagatcgccaaagagatcctggtcaacgaggaagatatcaagggctacagagtgaccagcaccggcaagcccgagttcaccaacctgaaggtgtaccacgacatcaaggatatcacagcccggaaagagattattgagaacgccgagctgctggaccaaatcgccaagatcctgaccatctaccagagcagcgaggacatccaagaggaactgaccaatctgaactccgagctgacccaagaagagatcgagcagatctctaatctgaaggggtacaccggcacacacaacctgagcctgaaggccatcaacctgatcctggacgagctgtggcacaccaacgacaaccagattgccatcttcaacaggctgaagctggtgcccaagaaggtggacctgtctcagcagaaagaaatccccaccacactggtggacgacttcattctgagccccgtggtcaagaggagcttcatccagagcatcaaagtgatcaacgccatcatcaagaagtacgggctgcccaacgatatcatcatcgagctggcccgcgagaagaactccaaggacgcccagaaaatgatcaacgagatgcagaagaggaaccgccagaccaacgagcggatcgaggaaatcatccggaccaccggcaaagagaacgccaagtacctgatcgagaagatcaagctgcacgacatgcaagagggcaagtgcctgtacagcctggaagccattcctctggaagatctgctgaacaatcccttcaactatgaggtggaccacatcatccccagaagcgtgtccttcgacaacagcttcaacaacaaggtgctcgtgaagcaagaggaaaacagcaagaagggcaacagaaccccattccagtacctgagcagcagcgacagcaagatcagctacgaaaccttcaagaagcacatcctgaatctggccaaaggcaagggcagaatcagcaagaccaagaaagaatacctgctcgaggaacgggacatcaacagattcagcgtgcagaaagacttcatcaatcggaacctggtggacaccagatacgccaccagaggcctgatgaatctgctgcggagctacttcagagtgaacaatctggacgtgaaagtcaagtccatcaacggcggcttcaccagctttctgcggcggaagtggaagttcaagaaagagcggaacaagggctataagcaccacgccgaggacgccctgatcattgccaacgccgatttcatcttcaaagagtggaagaaactggacaaggccaaaaaagtgatggaaaaccagatgttcgaggaaaagcaggccgagagcatgcccgagatcgaaaccgagcaagagtacaaagagattttcatcacgccccaccagatcaagcacattaaggacttcaaggactacaagtacagccaccgcgtggacaagaagcccaatagagagctgattaacgacaccctgtactctacccggaaggacgacaagggcaataccctgatcgtcaacaacctgaacggcctgtacgacaaggacaacgacaagctcaagaagctgatcaacaagagccccgagaaactgctgatgtaccaccacgatcctcagacctaccagaaactgaagctcatcatggaacagtacggcgacgagaagaatcccctgtacaagtactacgaggaaaccgggaactacctgaccaagtactccaaaaaggacaatgggcccgtgatcaagaagattaagtattacggcaacaagctgaatgcccacctggacatcaccgacgactaccccaacagcagaaacaaggtggtcaagctgtccctgaagccttacagattcgacgtgtacctggacaacggcgtgtacaagttcgtgaccgtgaagaacctggacgtcatcaaaaaagaaaactactacgaagtcaacagcaagtgctatgaggaagccaagaaactcaagaaaatcagcaaccaggccgagtttatcgcctccttctacaacaacgatctgatcaagatcaacggggagctgtatagagtgatcggcgtgaacaatgacctgctgaaccggatcgaagtgaacatgatcgacatcacctaccgcgagtacctcgagaacatgaacgataagcggcctccacggatcattaagacaatcgccagcaagacgcagagcattaagaagtacagcacagacatcctgggcaacctgtacgaagtgaagtctaagaagcacccgcagattatcaagaaaggc

SEQ ID NO: 155 - DNA, 14 bp, synthetic construct
  misc_feature 1..14: note = Description of Artificial Sequence: Syntheticoligonucleotide
  source 1..14: mol_type = other DNA
gcggccgcacgcgt

SEQ ID NO: 156 - DNA, 44 bp, synthetic construct
  misc_feature 1..44: note = Description of Artificial Sequence: Syntheticoligonucleotide
  source 1..44: mol_type = other DNA
ctcctgggcaacgtgctggttattgtgaccggtcgctagccacc

SEQ ID NO: 157 - DNA, 16 bp, synthetic construct
  misc_feature 1..16: note = Description of Artificial Sequence: Syntheticoligonucleotide
  source 1..16: mol_type = other DNA
cctgcaggcgccggcg

SEQ ID NO: 158 - DNA, 21 bp, synthetic construct
  misc_feature 1..21: note = Description of Artificial Sequence: Syntheticoligonucleotide
  source 1..21: mol_type = other DNA
gagctcgctgatcagcctcga

SEQ ID NO: 159 - DNA, 34 bp, synthetic construct
  misc_feature 1..34: note = Description of Artificial Sequence: Syntheticoligonucleotide
  source 1..34: mol_type = other DNA
aagcttgaattcagctgacgtgcctcggaccgct

SEQ ID NO: 160 - DNA, 38 bp, synthetic construct
  misc_feature 1..38: note = Description of Artificial Sequence: Syntheticoligonucleotide
  source 1..38: mol_type = other DNA
gcggccgcacgcgtctagatcccatatatggagttccg

SEQ ID NO: 161 - DNA, 30 bp, synthetic construct
  misc_feature 1..30: note = Description of Artificial Sequence: Syntheticoligonucleotide
  source 1..30: mol_type = other DNA
cagatcgcctggagacgcaccggtgccacc

SEQ ID NO: 162 - skipped

SEQ ID NO: 163 - DNA, 21 bp, synthetic construct
  misc_feature 1..21: note = Description of Artificial Sequence: Syntheticoligonucleotide
  source 1..21: mol_type = other DNA
gagctcgctgatcagcctcga

SEQ ID NO: 164 - skipped

SEQ ID NO: 165 - DNA, 12 bp, synthetic construct
  misc_feature 1..12: note = Description of Artificial Sequence: Syntheticoligonucleotide
  source 1..12: mol_type = other DNA
ggatcccgggct

SEQ ID NO: 166 - DNA, 24 bp, synthetic construct
  misc_feature 1..24: note = Description of Artificial Sequence: Syntheticoligonucleotide
  source 1..24: mol_type = other DNA
taagagctcgctgatcagcctcga

SEQ ID NO: 167 - DNA, 49 bp, synthetic construct
  misc_feature 1..49: note = Description of Artificial Sequence: Syntheticoligonucleotide
  source 1..49: mol_type = other DNA
ctaaagcttgaattcaagcttgaattcagctgacgtgcctcggaccgct

SEQ ID NO: 168-169 - skipped (2 entries)

SEQ ID NO: 170 - DNA, 37 bp, synthetic construct
  misc_feature 1..37: note = Description of Artificial Sequence: Syntheticoligonucleotide
  source 1..37: mol_type = other DNA
ctaaagcttgaattcagctgacgtgcctcggaccgct

SEQ ID NO: 171 - DNA, 27 bp, synthetic construct
  misc_feature 1..27: note = Description of Artificial Sequence: Syntheticoligonucleotide
  source 1..27: mol_type = other DNA
taataagagctcgctgatcagcctcga

SEQ ID NO: 172 - DNA, 2940 bp, synthetic construct
  misc_feature 1..2940: note = Description of Artificial Sequence: Syntheticpolynucleotide
  source 1..2940: mol_type = other DNA
ctgcgcgctcgctcgctcactgaggccgcccgggcgtcgggcgacctttggtcgcccggcctcagtgagcgagcgagcgcgcagagagggagtggccaactccatcactaggggttcctgcggccgcacgcgtgacattgattattgactagttattaatagtaatcaattacggggtcattagttcatagcccatatatggagttccgcgttacataacttacggtaaatggcccgcctggctgaccgcccaacgacccccgcccattgacgtcaataatgacgtatgttcccatagtaacgccaatagggactttccattgacgtcaatgggtggactatttacggtaaactgcccacttggcagtacatcaagtgtatcatatgccaagtacgccccctattgacgtcaatgacggtaaatggcccgcctggcattatgcccagtacatgaccttatgggactttcctacttggcagtacatctacgtattagtcatcgctattaccatgggtcgaggtgagccccacgttctgcttcactctccccatctcccccccctccccacccccaattttgtatttatttattttttaattattttgtgcagcgatgggggcggggggggggggggcgcgcgccaggcggggcggggcggggcgaggggcggggcggggcgaggcggagaggtgcggcggcagccaatcagagcggcgcgctccgaaagtttccttttatggcgaggcggcggcggcggcggccctataaaaagcgaagcgcgcggcgggcgggagtcgctgcgttgccttcgccccgtgccccgctccgcgccgcctcgcgccgcccgccccggctctgactgaccgcgttactcccacaggtgagcgggcgggacggcccttctcctccgggctgtaattagcgcttggtttaatgacggctcgtttcttttctgtggctgcgtgaaagccttaaagggctccgggagggccctttgtgcgggggggagcggctcggggggtgcgtgcgtgtgtgtgtgcgtggggagcgccgcgtgcggcccgcgctgcccggcggctgtgagcgctgcgggcgcggcgcggggctttgtgcgctccgcgtgtgcgcgaggggagcgcggccgggggcggtgccccgcggtgcgggggggctgcgaggggaacaaaggctgcgtgcggggtgtgtgcgtgggggggtgagcagggggtgtgggcgcggcggtcgggctgtaacccccccctgcacccccctccccgagttgctgagcacggcccggcttcgggtgcggggctccgtgcggggcgtggcgcggggctcgccgtgccgggcggggggtggcggcaggtgggggtgccgggcggggcggggccgcctcgggccggggagggctcgggggaggggcgcggcggcccccggagcgccggcgcatagctcttatgatagcaatgtcagcagtgcctttgagtctcagagatgcccgggttaagattctaaaattatcacgggtattacttgaggctcagaagtaaggttgaccatactctacagttgtgtctagagcctctgctaaccatgttcatgccttcttctttttcctacagctcctgggcaacgtgctggttattgtgaccggtcgctagccaccatggtgagcaagggcgaggagctgttcaccggggtggtgcccatcctggtcgagctggacggcgacgtaaacggccacaagttcagcgtgtccggcgagggcgagggcgatgccacctacggcaagctgaccctgaagttcatctgcaccaccggcaagctgcccgtgccctggcccaccctcgtgaccaccctgacctacggcgtgcagtgcttcagccgctaccccgaccacatgaagcagcacgacttcttcaagtccgccatgcccgaaggctacgtccaggagcgcaccatcttcttcaaggacgacggcaactacaagacccgcgccgaggtgaagttcgagggcgacaccctggtgaaccgcatcgagctgaagggcatcgacttcaaggaggacggcaacatcctggggcacaagctggagtacaactacaacagccacaacgtctatatcatggccgacaagcagaagaacggcatcaaggtgaacttcaagatccgccacaacatcgaggacggcagcgtgcagctcgccgaccactaccagcagaacacccccatcggcgacggccccgtgctgctgcccgacaaccactacctgagcacccagtccgccctgagcaaagaccccaacgagaagcgcgatcacatggtcctgctggagttcgtgaccgccgccgggatcactctcggcatggacgagctgtacaagtaacctgcaggcgccggcgcatagctcttatgatagcaatgtcagcagtgcctttgagtctcagagatgcccgggttaagattctaaaattatcacgggtattacttgaggctcagaagtaaggttgaccatactctacagttgtggagctcgctgatcagcctcgactgtgccttctagttgccagccatctgttgtttgcccctcccccgtgccttccttgaccctggaaggtgccactcccactgtcctttcctaataaaatgaggaaattgcatcgcattgtctgagtaggtgtcattctattctggggggtggggtggggcaggacagcaagggggaggattgggaagacaatagcaggcatgctggggatgcggtgggctctatggaagcttgaattcagctgacgtgcctcggaccgctaggaacccctagtgatggagttggccactccctctctgcgcgctcgctcgctcactgaggccgggcgaccaaaggtcgcccgacgcccgggctttgcccgggcggcctcagtgagcgagcgagcgcgcag

SEQ ID NO: 173 - DNA, 2978 bp, synthetic construct
  misc_feature 1..2978: note = Description of Artificial Sequence: Syntheticpolynucleotide
  source 1..2978: mol_type = other DNA
ctgcgcgctcgctcgctcactgaggccgcccgggcgtcgggcgacctttggtcgcccggcctcagtgagcgagcgagcgcgcagagagggagtggccaactccatcactaggggttcctgcggccgcacgcgtgacattgattattgactagttattaatagtaatcaattacggggtcattagttcatagcccatatatggagttccgcgttacataacttacggtaaatggcccgcctggctgaccgcccaacgacccccgcccattgacgtcaataatgacgtatgttcccatagtaacgccaatagggactttccattgacgtcaatgggtggactatttacggtaaactgcccacttggcagtacatcaagtgtatcatatgccaagtacgccccctattgacgtcaatgacggtaaatggcccgcctggcattatgcccagtacatgaccttatgggactttcctacttggcagtacatctacgtattagtcatcgctattaccatgggtcgaggtgagccccacgttctgcttcactctccccatctcccccccctccccacccccaattttgtatttatttattttttaattattttgtgcagcgatgggggcggggggggggggggcgcgcgccaggcggggcggggcggggcgaggggcggggcggggcgaggcggagaggtgcggcggcagccaatcagagcggcgcgctccgaaagtttccttttatggcgaggcggcggcggcggcggccctataaaaagcgaagcgcgcggcgggcgggagtcgctgcgttgccttcgccccgtgccccgctccgcgccgcctcgcgccgcccgccccggctctgactgaccgcgttactcccacaggtgagcgggcgggacggcccttctcctccgggctgtaattagcgcttggtttaatgacggctcgtttcttttctgtggctgcgtgaaagccttaaagggctccgggagggccctttgtgcgggggggagcggctcggggggtgcgtgcgtgtgtgtgtgcgtggggagcgccgcgtgcggcccgcgctgcccggcggctgtgagcgctgcgggcgcggcgcggggctttgtgcgctccgcgtgtgcgcgaggggagcgcggccgggggcggtgccccgcggtgcgggggggctgcgaggggaacaaaggctgcgtgcggggtgtgtgcgtgggggggtgagcagggggtgtgggcgcggcggtcgggctgtaacccccccctgcacccccctccccgagttgctgagcacggcccggcttcgggtgcggggctccgtgcggggcgtggcgcggggctcgccgtgccgggcggggggtggcggcaggtgggggtgccgggcggggcggggccgcctcgggccggggagggctcgggggaggggcgcggcggcccccggagcgccggcggagcaggaggaccaaggccctggcgaaggccgtggcctcgttgagtctcagagatgcccggtgtgcaggtcccaatggccgggtattactgagattccacggggacgcgggcctggacgccggcatccgggctcaggacccccctctctagagcctctgctaaccatgttcatgccttcttctttttcctacagctcctgggcaacgtgctggttattgtgaccggtcgctagccaccatggtgagcaagggcgaggagctgttcaccggggtggtgcccatcctggtcgagctggacggcgacgtaaacggccacaagttcagcgtgtccggcgagggcgagggcgatgccacctacggcaagctgaccctgaagttcatctgcaccaccggcaagctgcccgtgccctggcccaccctcgtgaccaccctgacctacggcgtgcagtgcttcagccgctaccccgaccacatgaagcagcacgacttcttcaagtccgccatgcccgaaggctacgtccaggagcgcaccatcttcttcaaggacgacggcaactacaagacccgcgccgaggtgaagttcgagggcgacaccctggtgaaccgcatcgagctgaagggcatcgacttcaaggaggacggcaacatcctggggcacaagctggagtacaactacaacagccacaacgtctatatcatggccgacaagcagaagaacggcatcaaggtgaacttcaagatccgccacaacatcgaggacggcagcgtgcagctcgccgaccactaccagcagaacacccccatcggcgacggccccgtgctgctgcccgacaaccactacctgagcacccagtccgccctgagcaaagaccccaacgagaagcgcgatcacatggtcctgctggagttcgtgaccgccgccgggatcactctcggcatggacgagctgtacaagtaacctgcaggcgccggcggagcaggaggaccaaggccctggcgaaggccgtggcctcgttgagtctcagagatgcccggtgtgcaggtcccaatggccgggtattactgagattccacggggacgcgggcctggacgccggcatccgggctcaggacccccctcgagctcgctgatcagcctcgactgtgccttctagttgccagccatctgttgtttgcccctcccccgtgccttccttgaccctggaaggtgccactcccactgtcctttcctaataaaatgaggaaattgcatcgcattgtctgagtaggtgtcattctattctggggggtggggtggggcaggacagcaagggggaggattgggaagacaatagcaggcatgctggggatgcggtgggctctatggaagcttgaattcagctgacgtgcctcggaccgctaggaacccctagtgatggagttggccactccctctctgcgcgctcgctcgctcactgaggccgggcgaccaaaggtcgcccgacgcccgggctttgcccgggcggcctcagtgagcgagcgagcgcgcag

SEQ ID NO: 174 - DNA, 2982 bp, synthetic construct
  misc_feature 1..2982: note = Description of Artificial Sequence: Syntheticpolynucleotide
  source 1..2982: mol_type = other DNA
ctgcgcgctcgctcgctcactgaggccgcccgggcgtcgggcgacctttggtcgcccggcctcagtgagcgagcgagcgcgcagagagggagtggccaactccatcactaggggttcctgcggccgcacgcgtgacattgattattgactagttattaatagtaatcaattacggggtcattagttcatagcccatatatggagttccgcgttacataacttacggtaaatggcccgcctggctgaccgcccaacgacccccgcccattgacgtcaataatgacgtatgttcccatagtaacgccaatagggactttccattgacgtcaatgggtggactatttacggtaaactgcccacttggcagtacatcaagtgtatcatatgccaagtacgccccctattgacgtcaatgacggtaaatggcccgcctggcattatgcccagtacatgaccttatgggactttcctacttggcagtacatctacgtattagtcatcgctattaccatgggtcgaggtgagccccacgttctgcttcactctccccatctcccccccctccccacccccaattttgtatttatttattttttaattattttgtgcagcgatgggggcggggggggggggggcgcgcgccaggcggggcggggcggggcgaggggcggggcggggcgaggcggagaggtgcggcggcagccaatcagagcggcgcgctccgaaagtttccttttatggcgaggcggcggcggcggcggccctataaaaagcgaagcgcgcggcgggcgggagtcgctgcgttgccttcgccccgtgccccgctccgcgccgcctcgcgccgcccgccccggctctgactgaccgcgttactcccacaggtgagcgggcgggacggcccttctcctccgggctgtaattagcgcttggtttaatgacggctcgtttcttttctgtggctgcgtgaaagccttaaagggctccgggagggccctttgtgcgggggggagcggctcggggggtgcgtgcgtgtgtgtgtgcgtggggagcgccgcgtgcggcccgcgctgcccggcggctgtgagcgctgcgggcgcggcgcggggctttgtgcgctccgcgtgtgcgcgaggggagcgcggccgggggcggtgccccgcggtgcgggggggctgcgaggggaacaaaggctgcgtgcggggtgtgtgcgtgggggggtgagcagggggtgtgggcgcggcggtcgggctgtaacccccccctgcacccccctccccgagttgctgagcacggcccggcttcgggtgcggggctccgtgcggggcgtggcgcggggctcgccgtgccgggcggggggtggcggcaggtgggggtgccgggcggggcggggccgcctcgggccggggagggctcgggggaggggcgcggcggcccccggagcgccggcggtgtccccagagagcccgcaccagtgccatctgcttggccgatttgagtctcagagatgcccggcttgtgtctctccgctctgagctgtctgtctcgaggctcatatgggaaaagcaggacccgcagctgcgtccgcctcccctgcattctagagcctctgctaaccatgttcatgccttcttctttttcctacagctcctgggcaacgtgctggttattgtgaccggtcgctagccaccatggtgagcaagggcgaggagctgttcaccggggtggtgcccatcctggtcgagctggacggcgacgtaaacggccacaagttcagcgtgtccggcgagggcgagggcgatgccacctacggcaagctgaccctgaagttcatctgcaccaccggcaagctgcccgtgccctggcccaccctcgtgaccaccctgacctacggcgtgcagtgcttcagccgctaccccgaccacatgaagcagcacgacttcttcaagtccgccatgcccgaaggctacgtccaggagcgcaccatcttcttcaaggacgacggcaactacaagacccgcgccgaggtgaagttcgagggcgacaccctggtgaaccgcatcgagctgaagggcatcgacttcaaggaggacggcaacatcctggggcacaagctggagtacaactacaacagccacaacgtctatatcatggccgacaagcagaagaacggcatcaaggtgaacttcaagatccgccacaacatcgaggacggcagcgtgcagctcgccgaccactaccagcagaacacccccatcggcgacggccccgtgctgctgcccgacaaccactacctgagcacccagtccgccctgagcaaagaccccaacgagaagcgcgatcacatggtcctgctggagttcgtgaccgccgccgggatcactctcggcatggacgagctgtacaagtaacctgcaggcgccggcggtgtccccagagagcccgcaccagtgccatctgcttggccgatttgagtctcagagatgcccggcttgtgtctctccgctctgagctgtctgtctcgaggctcatatgggaaaagcaggacccgcagctgcgtccgcctcccctgcatgagctcgctgatcagcctcgactgtgccttctagttgccagccatctgttgtttgcccctcccccgtgccttccttgaccctggaaggtgccactcccactgtcctttcctaataaaatgaggaaattgcatcgcattgtctgagtaggtgtcattctattctggggggtggggtggggcaggacagcaagggggaggattgggaagacaatagcaggcatgctggggatgcggtgggctctatggaagcttgaattcagctgacgtgcctcggaccgctaggaacccctagtgatggagttggccactccctctctgcgcgctcgctcgctcactgaggccgggcgaccaaaggtcgcccgacgcccgggctttgcccgggcggcctcagtgagcgagcgagcgcgcag

SEQ ID NO: 175 - DNA, 2940 bp, synthetic construct
  misc_feature 1..2940: note = Description of Artificial Sequence: Syntheticpolynucleotide
  source 1..2940: mol_type = other DNA
ctgcgcgctcgctcgctcactgaggccgcccgggcgtcgggcgacctttggtcgcccggcctcagtgagcgagcgagcgcgcagagagggagtggccaactccatcactaggggttcctgcggccgcacgcgtgacattgattattgactagttattaatagtaatcaattacggggtcattagttcatagcccatatatggagttccgcgttacataacttacggtaaatggcccgcctggctgaccgcccaacgacccccgcccattgacgtcaataatgacgtatgttcccatagtaacgccaatagggactttccattgacgtcaatgggtggactatttacggtaaactgcccacttggcagtacatcaagtgtatcatatgccaagtacgccccctattgacgtcaatgacggtaaatggcccgcctggcattatgcccagtacatgaccttatgggactttcctacttggcagtacatctacgtattagtcatcgctattaccatgggtcgaggtgagccccacgttctgcttcactctccccatctcccccccctccccacccccaattttgtatttatttattttttaattattttgtgcagcgatgggggcggggggggggggggcgcgcgccaggcggggcggggcggggcgaggggcggggcggggcgaggcggagaggtgcggcggcagccaatcagagcggcgcgctccgaaagtttccttttatggcgaggcggcggcggcggcggccctataaaaagcgaagcgcgcggcgggcgggagtcgctgcgttgccttcgccccgtgccccgctccgcgccgcctcgcgccgcccgccccggctctgactgaccgcgttactcccacaggtgagcgggcgggacggcccttctcctccgggctgtaattagcgcttggtttaatgacggctcgtttcttttctgtggctgcgtgaaagccttaaagggctccgggagggccctttgtgcgggggggagcggctcggggggtgcgtgcgtgtgtgtgtgcgtggggagcgccgcgtgcggcccgcgctgcccggcggctgtgagcgctgcgggcgcggcgcggggctttgtgcgctccgcgtgtgcgcgaggggagcgcggccgggggcggtgccccgcggtgcgggggggctgcgaggggaacaaaggctgcgtgcggggtgtgtgcgtgggggggtgagcagggggtgtgggcgcggcggtcgggctgtaacccccccctgcacccccctccccgagttgctgagcacggcccggcttcgggtgcggggctccgtgcggggcgtggcgcggggctcgccgtgccgggcggggggtggcggcaggtgggggtgccgggcggggcggggccgcctcgggccggggagggctcgggggaggggcgcggcggcccccggagcgccggcgcatagctcttatgatagcaatgtcagcagtgcctttgagtctcagagatgcccgggttaagattctaaaattatcacgggtattacttgaggctcagaagtaaggttgaccatactctacagttgtgtctagagcctctgctaaccatgttcatgccttcttctttttcctacagctcctgggcaacgtgctggttattgtgaccggtcgctagccaccatggtgagcaagggcgaggagctgttcaccggggtggtgcccatcctggtcgagctggacggcgacgtaaacggccacaagttcagcgtgtccggcgagggcgagggcgatgccacctacggcaagctgaccctgaagttcatctgcaccaccggcaagctgcccgtgccctggcccaccctcgtgaccaccctgacctacggcgtgcagtgcttcagccgctaccccgaccacatgaagcagcacgacttcttcaagtccgccatgcccgaaggctacgtccaggagcgcaccatcttcttcaaggacgacggcaactacaagacccgcgccgaggtgaagttcgagggcgacaccctggtgaaccgcatcgagctgaagggcatcgacttcaaggaggacggcaacatcctggggcacaagctggagtacaactacaacagccacaacgtctatatcatggccgacaagcagaagaacggcatcaaggtgaacttcaagatccgccacaacatcgaggacggcagcgtgcagctcgccgaccactaccagcagaacacccccatcggcgacggccccgtgctgctgcccgacaaccactacctgagcacccagtccgccctgagcaaagaccccaacgagaagcgcgatcacatggtcctgctggagttcgtgaccgccgccgggatcactctcggcatggacgagctgtacaagtaacctgcaggcgccggcgcatagctcttatgatagcaatgtcagcagtgcctttctcgaagtgcttctgccgggttaagattctaaaattatcacggtagaaacatcttcgggagaagtaaggttgaccatactctacagttgtggagctcgctgatcagcctcgactgtgccttctagttgccagccatctgttgtttgcccctcccccgtgccttccttgaccctggaaggtgccactcccactgtcctttcctaataaaatgaggaaattgcatcgcattgtctgagtaggtgtcattctattctggggggtggggtggggcaggacagcaagggggaggattgggaagacaatagcaggcatgctggggatgcggtgggctctatggaagcttgaattcagctgacgtgcctcggaccgctaggaacccctagtgatggagttggccactccctctctgcgcgctcgctcgctcactgaggccgggcgaccaaaggtcgcccgacgcccgggctttgcccgggcggcctcagtgagcgagcgagcgcgcag

SEQ ID NO: 176 - DNA, 2978 bp, synthetic construct
  misc_feature 1..2978: note = Description of Artificial Sequence: Syntheticpolynucleotide
  source 1..2978: mol_type = other DNA
ctgcgcgctcgctcgctcactgaggccgcccgggcgtcgggcgacctttggtcgcccggcctcagtgagcgagcgagcgcgcagagagggagtggccaactccatcactaggggttcctgcggccgcacgcgtgacattgattattgactagttattaatagtaatcaattacggggtcattagttcatagcccatatatggagttccgcgttacataacttacggtaaatggcccgcctggctgaccgcccaacgacccccgcccattgacgtcaataatgacgtatgttcccatagtaacgccaatagggactttccattgacgtcaatgggtggactatttacggtaaactgcccacttggcagtacatcaagtgtatcatatgccaagtacgccccctattgacgtcaatgacggtaaatggcccgcctggcattatgcccagtacatgaccttatgggactttcctacttggcagtacatctacgtattagtcatcgctattaccatgggtcgaggtgagccccacgttctgcttcactctccccatctcccccccctccccacccccaattttgtatttatttattttttaattattttgtgcagcgatgggggcggggggggggggggcgcgcgccaggcggggcggggcggggcgaggggcggggcggggcgaggcggagaggtgcggcggcagccaatcagagcggcgcgctccgaaagtttccttttatggcgaggcggcggcggcggcggccctataaaaagcgaagcgcgcggcgggcgggagtcgctgcgttgccttcgccccgtgccccgctccgcgccgcctcgcgccgcccgccccggctctgactgaccgcgttactcccacaggtgagcgggcgggacggcccttctcctccgggctgtaattagcgcttggtttaatgacggctcgtttcttttctgtggctgcgtgaaagccttaaagggctccgggagggccctttgtgcgggggggagcggctcggggggtgcgtgcgtgtgtgtgtgcgtggggagcgccgcgtgcggcccgcgctgcccggcggctgtgagcgctgcgggcgcggcgcggggctttgtgcgctccgcgtgtgcgcgaggggagcgcggccgggggcggtgccccgcggtgcgggggggctgcgaggggaacaaaggctgcgtgcggggtgtgtgcgtgggggggtgagcagggggtgtgggcgcggcggtcgggctgtaacccccccctgcacccccctccccgagttgctgagcacggcccggcttcgggtgcggggctccgtgcggggcgtggcgcggggctcgccgtgccgggcggggggtggcggcaggtgggggtgccgggcggggcggggccgcctcgggccggggagggctcgggggaggggcgcggcggcccccggagcgccggcggagcaggaggaccaaggccctggcgaaggccgtggcctcgttgagtctcagagatgcccggtgtgcaggtcccaatggccgggtattactgagattccacggggacgcgggcctggacgccggcatccgggctcaggacccccctctctagagcctctgctaaccatgttcatgccttcttctttttcctacagctcctgggcaacgtgctggttattgtgaccggtcgctagccaccatggtgagcaagggcgaggagctgttcaccggggtggtgcccatcctggtcgagctggacggcgacgtaaacggccacaagttcagcgtgtccggcgagggcgagggcgatgccacctacggcaagctgaccctgaagttcatctgcaccaccggcaagctgcccgtgccctggcccaccctcgtgaccaccctgacctacggcgtgcagtgcttcagccgctaccccgaccacatgaagcagcacgacttcttcaagtccgccatgcccgaaggctacgtccaggagcgcaccatcttcttcaaggacgacggcaactacaagacccgcgccgaggtgaagttcgagggcgacaccctggtgaaccgcatcgagctgaagggcatcgacttcaaggaggacggcaacatcctggggcacaagctggagtacaactacaacagccacaacgtctatatcatggccgacaagcagaagaacggcatcaaggtgaacttcaagatccgccacaacatcgaggacggcagcgtgcagctcgccgaccactaccagcagaacacccccatcggcgacggccccgtgctgctgcccgacaaccactacctgagcacccagtccgccctgagcaaagaccccaacgagaagcgcgatcacatggtcctgctggagttcgtgaccgccgccgggatcactctcggcatggacgagctgtacaagtaacctgcaggcgccggcggagcaggaggaccaaggccctggcgaaggccgtggcctcgttctcgaagtgcttctgccggtgtgcaggtcccaatggccggtagaatcgtttcgagcacggggacgcgggcctggacgccggcatccgggctcaggacccccctcgagctcgctgatcagcctcgactgtgccttctagttgccagccatctgttgtttgcccctcccccgtgccttccttgaccctggaaggtgccactcccactgtcctttcctaataaaatgaggaaattgcatcgcattgtctgagtaggtgtcattctattctggggggtggggtggggcaggacagcaagggggaggattgggaagacaatagcaggcatgctggggatgcggtgggctctatggaagcttgaattcagctgacgtgcctcggaccgctaggaacccctagtgatggagttggccactccctctctgcgcgctcgctcgctcactgaggccgggcgaccaaaggtcgcccgacgcccgggctttgcccgggcggcctcagtgagcgagcgagcgcgcag

SEQ ID NO: 177 - DNA, 2982 bp, synthetic construct
  misc_feature 1..2982: note = Description of Artificial Sequence: Syntheticpolynucleotide
  source 1..2982: mol_type = other DNA
ctgcgcgctcgctcgctcactgaggccgcccgggcgtcgggcgacctttggtcgcccggcctcagtgagcgagcgagcgcgcagagagggagtggccaactccatcactaggggttcctgcggccgcacgcgtgacattgattattgactagttattaatagtaatcaattacggggtcattagttcatagcccatatatggagttccgcgttacataacttacggtaaatggcccgcctggctgaccgcccaacgacccccgcccattgacgtcaataatgacgtatgttcccatagtaacgccaatagggactttccattgacgtcaatgggtggactatttacggtaaactgcccacttggcagtacatcaagtgtatcatatgccaagtacgccccctattgacgtcaatgacggtaaatggcccgcctggcattatgcccagtacatgaccttatgggactttcctacttggcagtacatctacgtattagtcatcgctattaccatgggtcgaggtgagccccacgttctgcttcactctccccatctcccccccctccccacccccaattttgtatttatttattttttaattattttgtgcagcgatgggggcggggggggggggggcgcgcgccaggcggggcggggcggggcgaggggcggggcggggcgaggcggagaggtgcggcggcagccaatcagagcggcgcgctccgaaagtttccttttatggcgaggcggcggcggcggcggccctataaaaagcgaagcgcgcggcgggcgggagtcgctgcgttgccttcgccccgtgccccgctccgcgccgcctcgcgccgcccgccccggctctgactgaccgcgttactcccacaggtgagcgggcgggacggcccttctcctccgggctgtaattagcgcttggtttaatgacggctcgtttcttttctgtggctgcgtgaaagccttaaagggctccgggagggccctttgtgcgggggggagcggctcggggggtgcgtgcgtgtgtgtgtgcgtggggagcgccgcgtgcggcccgcgctgcccggcggctgtgagcgctgcgggcgcggcgcggggctttgtgcgctccgcgtgtgcgcgaggggagcgcggccgggggcggtgccccgcggtgcgggggggctgcgaggggaacaaaggctgcgtgcggggtgtgtgcgtgggggggtgagcagggggtgtgggcgcggcggtcgggctgtaacccccccctgcacccccctccccgagttgctgagcacggcccggcttcgggtgcggggctccgtgcggggcgtggcgcggggctcgccgtgccgggcggggggtggcggcaggtgggggtgccgggcggggcggggccgcctcgggccggggagggctcgggggaggggcgcggcggcccccggagcgccggcggtgtccccagagagcccgcaccagtgccatctgcttggccgatttgagtctcagagatgcccggcttgtgtctctccgctctgagctgtctgtctcgaggctcatatgggaaaagcaggacccgcagctgcgtccgcctcccctgcattctagagcctctgctaaccatgttcatgccttcttctttttcctacagctcctgggcaacgtgctggttattgtgaccggtcgctagccaccatggtgagcaagggcgaggagctgttcaccggggtggtgcccatcctggtcgagctggacggcgacgtaaacggccacaagttcagcgtgtccggcgagggcgagggcgatgccacctacggcaagctgaccctgaagttcatctgcaccaccggcaagctgcccgtgccctggcccaccctcgtgaccaccctgacctacggcgtgcagtgcttcagccgctaccccgaccacatgaagcagcacgacttcttcaagtccgccatgcccgaaggctacgtccaggagcgcaccatcttcttcaaggacgacggcaactacaagacccgcgccgaggtgaagttcgagggcgacaccctggtgaaccgcatcgagctgaagggcatcgacttcaaggaggacggcaacatcctggggcacaagctggagtacaactacaacagccacaacgtctatatcatggccgacaagcagaagaacggcatcaaggtgaacttcaagatccgccacaacatcgaggacggcagcgtgcagctcgccgaccactaccagcagaacacccccatcggcgacggccccgtgctgctgcccgacaaccactacctgagcacccagtccgccctgagcaaagaccccaacgagaagcgcgatcacatggtcctgctggagttcgtgaccgccgccgggatcactctcggcatggacgagctgtacaagtaacctgcaggcgccggcggtgtccccagagagcccgcaccagtgccatctgcttggccgatttctcgaagtgcttctgccggcttgtgtctctccgctctgagctgtgaggagctttcgggatatgggaaaagcaggacccgcagctgcgtccgcctcccctgcatgagctcgctgatcagcctcgactgtgccttctagttgccagccatctgttgtttgcccctcccccgtgccttccttgaccctggaaggtgccactcccactgtcctttcctaataaaatgaggaaattgcatcgcattgtctgagtaggtgtcattctattctggggggtggggtggggcaggacagcaagggggaggattgggaagacaatagcaggcatgctggggatgcggtgggctctatggaagcttgaattcagctgacgtgcctcggaccgctaggaacccctagtgatggagttggccactccctctctgcgcgctcgctcgctcactgaggccgggcgaccaaaggtcgcccgacgcccgggctttgcccgggcggcctcagtgagcgagcgagcgcgcag

SEQ ID NO: 178 - DNA, 2940 bp, synthetic construct
  misc_feature 1..2940: note = Description of Artificial Sequence: Syntheticpolynucleotide
  source 1..2940: mol_type = other DNA
ctgcgcgctcgctcgctcactgaggccgcccgggcgtcgggcgacctttggtcgcccggcctcagtgagcgagcgagcgcgcagagagggagtggccaactccatcactaggggttcctgcggccgcacgcgtgacattgattattgactagttattaatagtaatcaattacggggtcattagttcatagcccatatatggagttccgcgttacataacttacggtaaatggcccgcctggctgaccgcccaacgacccccgcccattgacgtcaataatgacgtatgttcccatagtaacgccaatagggactttccattgacgtcaatgggtggactatttacggtaaactgcccacttggcagtacatcaagtgtatcatatgccaagtacgccccctattgacgtcaatgacggtaaatggcccgcctggcattatgcccagtacatgaccttatgggactttcctacttggcagtacatctacgtattagtcatcgctattaccatgggtcgaggtgagccccacgttctgcttcactctccccatctcccccccctccccacccccaattttgtatttatttattttttaattattttgtgcagcgatgggggcggggggggggggggcgcgcgccaggcggggcggggcggggcgaggggcggggcggggcgaggcggagaggtgcggcggcagccaatcagagcggcgcgctccgaaagtttccttttatggcgaggcggcggcggcggcggccctataaaaagcgaagcgcgcggcgggcgggagtcgctgcgttgccttcgccccgtgccccgctccgcgccgcctcgcgccgcccgccccggctctgactgaccgcgttactcccacaggtgagcgggcgggacggcccttctcctccgggctgtaattagcgcttggtttaatgacggctcgtttcttttctgtggctgcgtgaaagccttaaagggctccgggagggccctttgtgcgggggggagcggctcggggggtgcgtgcgtgtgtgtgtgcgtggggagcgccgcgtgcggcccgcgctgcccggcggctgtgagcgctgcgggcgcggcgcggggctttgtgcgctccgcgtgtgcgcgaggggagcgcggccgggggcggtgccccgcggtgcgggggggctgcgaggggaacaaaggctgcgtgcggggtgtgtgcgtgggggggtgagcagggggtgtgggcgcggcggtcgggctgtaacccccccctgcacccccctccccgagttgctgagcacggcccggcttcgggtgcggggctccgtgcggggcgtggcgcggggctcgccgtgccgggcggggggtggcggcaggtgggggtgccgggcggggcggggccgcctcgggccggggagggctcgggggaggggcgcggcggcccccggagcgccggcgcatagctcttatgatagcaatgtcagcagtgcctttgagtctcagagatgcccgggttaagattctaaaattatcacgggtattacttgaggctcagaagtaaggttgaccatactctacagttgtgtctagagcctctgctaaccatgttcatgccttcttctttttcctacagctcctgggcaacgtgctggttattgtgaccggtcgctagccaccatggtgagcaagggcgaggagctgttcaccggggtggtgcccatcctggtcgagctggacggcgacgtaaacggccacaagttcagcgtgtccggcgagggcgagggcgatgccacctacggcaagctgaccctgaagttcatctgcaccaccggcaagctgcccgtgccctggcccaccctcgtgaccaccctgacctacggcgtgcagtgcttcagccgctaccccgaccacatgaagcagcacgacttcttcaagtccgccatgcccgaaggctacgtccaggagcgcaccatcttcttcaaggacgacggcaactacaagacccgcgccgaggtgaagttcgagggcgacaccctggtgaaccgcatcgagctgaagggcatcgacttcaaggaggacggcaacatcctggggcacaagctggagtacaactacaacagccacaacgtctatatcatggccgacaagcagaagaacggcatcaaggtgaacttcaagatccgccacaacatcgaggacggcagcgtgcagctcgccgaccactaccagcagaacacccccatcggcgacggccccgtgctgctgcccgacaaccactacctgagcacccagtccgccctgagcaaagaccccaacgagaagcgcgatcacatggtcctgctggagttcgtgaccgccgccgggatcactctcggcatggacgagctgtacaagtaacctgcaggcgccggcgcatagctcttatgatagcaatgtcagcagtgcctttctccaccttgaccacgcgtgttaagattctaaaattatctcgtgtggtaagtggtggagagaagtaaggttgaccatactctacagttgtggagctcgctgatcagcctcgactgtgccttctagttgccagccatctgttgtttgcccctcccccgtgccttccttgaccctggaaggtgccactcccactgtcctttcctaataaaatgaggaaattgcatcgcattgtctgagtaggtgtcattctattctggggggtggggtggggcaggacagcaagggggaggattgggaagacaatagcaggcatgctggggatgcggtgggctctatggaagcttgaattcagctgacgtgcctcggaccgctaggaacccctagtgatggagttggccactccctctctgcgcgctcgctcgctcactgaggccgggcgaccaaaggtcgcccgacgcccgggctttgcccgggcggcctcagtgagcgagcgagcgcgcag

SEQ ID NO: 179 - DNA, 2978 bp, synthetic construct
  misc_feature 1..2978: note = Description of Artificial Sequence: Syntheticpolynucleotide
  source 1..2978: mol_type = other DNA
ctgcgcgctcgctcgctcactgaggccgcccgggcgtcgggcgacctttggtcgcccggcctcagtgagcgagcgagcgcgcagagagggagtggccaactccatcactaggggttcctgcggccgcacgcgtgacattgattattgactagttattaatagtaatcaattacggggtcattagttcatagcccatatatggagttccgcgttacataacttacggtaaatggcccgcctggctgaccgcccaacgacccccgcccattgacgtcaataatgacgtatgttcccatagtaacgccaatagggactttccattgacgtcaatgggtggactatttacggtaaactgcccacttggcagtacatcaagtgtatcatatgccaagtacgccccctattgacgtcaatgacggtaaatggcccgcctggcattatgcccagtacatgaccttatgggactttcctacttggcagtacatctacgtattagtcatcgctattaccatgggtcgaggtgagccccacgttctgcttcactctccccatctcccccccctccccacccccaattttgtatttatttattttttaattattttgtgcagcgatgggggcggggggggggggggcgcgcgccaggcggggcggggcggggcgaggggcggggcggggcgaggcggagaggtgcggcggcagccaatcagagcggcgcgctccgaaagtttccttttatggcgaggcggcggcggcggcggccctataaaaagcgaagcgcgcggcgggcgggagtcgctgcgttgccttcgccccgtgccccgctccgcgccgcctcgcgccgcccgccccggctctgactgaccgcgttactcccacaggtgagcgggcgggacggcccttctcctccgggctgtaattagcgcttggtttaatgacggctcgtttcttttctgtggctgcgtgaaagccttaaagggctccgggagggccctttgtgcgggggggagcggctcggggggtgcgtgcgtgtgtgtgtgcgtggggagcgccgcgtgcggcccgcgctgcccggcggctgtgagcgctgcgggcgcggcgcggggctttgtgcgctccgcgtgtgcgcgaggggagcgcggccgggggcggtgccccgcggtgcgggggggctgcgaggggaacaaaggctgcgtgcggggtgtgtgcgtgggggggtgagcagggggtgtgggcgcggcggtcgggctgtaacccccccctgcacccccctccccgagttgctgagcacggcccggcttcgggtgcggggctccgtgcggggcgtggcgcggggctcgccgtgccgggcggggggtggcggcaggtgggggtgccgggcggggcggggccgcctcgggccggggagggctcgggggaggggcgcggcggcccccggagcgccggcggagcaggaggaccaaggccctggcgaaggccgtggcctcgttgagtctcagagatgcccggtgtgcaggtcccaatggccgggtattactgagattccacggggacgcgggcctggacgccggcatccgggctcaggacccccctctctagagcctctgctaaccatgttcatgccttcttctttttcctacagctcctgggcaacgtgctggttattgtgaccggtcgctagccaccatggtgagcaagggcgaggagctgttcaccggggtggtgcccatcctggtcgagctggacggcgacgtaaacggccacaagttcagcgtgtccggcgagggcgagggcgatgccacctacggcaagctgaccctgaagttcatctgcaccaccggcaagctgcccgtgccctggcccaccctcgtgaccaccctgacctacggcgtgcagtgcttcagccgctaccccgaccacatgaagcagcacgacttcttcaagtccgccatgcccgaaggctacgtccaggagcgcaccatcttcttcaaggacgacggcaactacaagacccgcgccgaggtgaagttcgagggcgacaccctggtgaaccgcatcgagctgaagggcatcgacttcaaggaggacggcaacatcctggggcacaagctggagtacaactacaacagccacaacgtctatatcatggccgacaagcagaagaacggcatcaaggtgaacttcaagatccgccacaacatcgaggacggcagcgtgcagctcgccgaccactaccagcagaacacccccatcggcgacggccccgtgctgctgcccgacaaccactacctgagcacccagtccgccctgagcaaagaccccaacgagaagcgcgatcacatggtcctgctggagttcgtgaccgccgccgggatcactctcggcatggacgagctgtacaagtaacctgcaggcgccggcggagcaggaggaccaaggccctggcgaaggccgtggcctcgttctccaccttgaccacgcgttgtgcaggtcccaatgggcgtgtggtagaggtggagcacggggacgcgggcctggacgccggcatccgggctcaggacccccctcgagctcgctgatcagcctcgactgtgccttctagttgccagccatctgttgtttgcccctcccccgtgccttccttgaccctggaaggtgccactcccactgtcctttcctaataaaatgaggaaattgcatcgcattgtctgagtaggtgtcattctattctggggggtggggtggggcaggacagcaagggggaggattgggaagacaatagcaggcatgctggggatgcggtgggctctatggaagcttgaattcagctgacgtgcctcggaccgctaggaacccctagtgatggagttggccactccctctctgcgcgctcgctcgctcactgaggccgggcgaccaaaggtcgcccgacgcccgggctttgcccgggcggcctcagtgagcgagcgagcgcgcag

SEQ ID NO: 180 - DNA, 2982 bp, synthetic construct
  misc_feature 1..2982: note = Description of Artificial Sequence: Syntheticpolynucleotide
  source 1..2982: mol_type = other DNA
ctgcgcgctcgctcgctcactgaggccgcccgggcgtcgggcgacctttggtcgcccggcctcagtgagcgagcgagcgcgcagagagggagtggccaactccatcactaggggttcctgcggccgcacgcgtgacattgattattgactagttattaatagtaatcaattacggggtcattagttcatagcccatatatggagttccgcgttacataacttacggtaaatggcccgcctggctgaccgcccaacgacccccgcccattgacgtcaataatgacgtatgttcccatagtaacgccaatagggactttccattgacgtcaatgggtggactatttacggtaaactgcccacttggcagtacatcaagtgtatcatatgccaagtacgccccctattgacgtcaatgacggtaaatggcccgcctggcattatgcccagtacatgaccttatgggactttcctacttggcagtacatctacgtattagtcatcgctattaccatgggtcgaggtgagccccacgttctgcttcactctccccatctcccccccctccccacccccaattttgtatttatttattttttaattattttgtgcagcgatgggggcggggggggggggggcgcgcgccaggcggggcggggcggggcgaggggcggggcggggcgaggcggagaggtgcggcggcagccaatcagagcggcgcgctccgaaagtttccttttatggcgaggcggcggcggcggcggccctataaaaagcgaagcgcgcggcgggcgggagtcgctgcgttgccttcgccccgtgccccgctccgcgccgcctcgcgccgcccgccccggctctgactgaccgcgttactcccacaggtgagcgggcgggacggcccttctcctccgggctgtaattagcgcttggtttaatgacggctcgtttcttttctgtggctgcgtgaaagccttaaagggctccgggagggccctttgtgcgggggggagcggctcggggggtgcgtgcgtgtgtgtgtgcgtggggagcgccgcgtgcggcccgcgctgcccggcggctgtgagcgctgcgggcgcggcgcggggctttgtgcgctccgcgtgtgcgcgaggggagcgcggccgggggcggtgccccgcggtgcgggggggctgcgaggggaacaaaggctgcgtgcggggtgtgtgcgtgggggggtgagcagggggtgtgggcgcggcggtcgggctgtaacccccccctgcacccccctccccgagttgctgagcacggcccggcttcgggtgcggggctccgtgcggggcgtggcgcggggctcgccgtgccgggcggggggtggcggcaggtgggggtgccgggcggggcggggccgcctcgggccggggagggctcgggggaggggcgcggcggcccccggagcgccggcggtgtccccagagagcccgcaccagtgccatctgcttggccgatttgagtctcagagatgcccggcttgtgtctctccgctctgagctgtctgtctcgaggctcatatgggaaaagcaggacccgcagctgcgtccgcctcccctgcattctagagcctctgctaaccatgttcatgccttcttctttttcctacagctcctgggcaacgtgctggttattgtgaccggtcgctagccaccatggtgagcaagggcgaggagctgttcaccggggtggtgcccatcctggtcgagctggacggcgacgtaaacggccacaagttcagcgtgtccggcgagggcgagggcgatgccacctacggcaagctgaccctgaagttcatctgcaccaccggcaagctgcccgtgccctggcccaccctcgtgaccaccctgacctacggcgtgcagtgcttcagccgctaccccgaccacatgaagcagcacgacttcttcaagtccgccatgcccgaaggctacgtccaggagcgcaccatcttcttcaaggacgacggcaactacaagacccgcgccgaggtgaagttcgagggcgacaccctggtgaaccgcatcgagctgaagggcatcgacttcaaggaggacggcaacatcctggggcacaagctggagtacaactacaacagccacaacgtctatatcatggccgacaagcagaagaacggcatcaaggtgaacttcaagatccgccacaacatcgaggacggcagcgtgcagctcgccgaccactaccagcagaacacccccatcggcgacggccccgtgctgctgcccgacaaccactacctgagcacccagtccgccctgagcaaagaccccaacgagaagcgcgatcacatggtcctgctggagttcgtgaccgccgccgggatcactctcggcatggacgagctgtacaagtaacctgcaggcgccggcggtgtccccagagagcccgcaccagtgccatctgcttggccgatttctccaccttgaccacgcgtcttgtgtctctccgctctgaggtgactggttgggtggagatatgggaaaagcaggacccgcagctgcgtccgcctcccctgcatgagctcgctgatcagcctcgactgtgccttctagttgccagccatctgttgtttgcccctcccccgtgccttccttgaccctggaaggtgccactcccactgtcctttcctaataaaatgaggaaattgcatcgcattgtctgagtaggtgtcattctattctggggggtggggtggggcaggacagcaagggggaggattgggaagacaatagcaggcatgctggggatgcggtgggctctatggaagcttgaattcagctgacgtgcctcggaccgctaggaacccctagtgatggagttggccactccctctctgcgcgctcgctcgctcactgaggccgggcgaccaaaggtcgcccgacgcccgggctttgcccgggcggcctcagtgagcgagcgagcgcgcag

SEQ ID NO: 181 - DNA, 2940 bp, synthetic construct
  misc_feature 1..2940: note = Description of Artificial Sequence: Syntheticpolynucleotide
  source 1..2940: mol_type = other DNA
ctgcgcgctcgctcgctcactgaggccgcccgggcgtcgggcgacctttggtcgcccggcctcagtgagcgagcgagcgcgcagagagggagtggccaactccatcactaggggttcctgcggccgcacgcgtgacattgattattgactagttattaatagtaatcaattacggggtcattagttcatagcccatatatggagttccgcgttacataacttacggtaaatggcccgcctggctgaccgcccaacgacccccgcccattgacgtcaataatgacgtatgttcccatagtaacgccaatagggactttccattgacgtcaatgggtggactatttacggtaaactgcccacttggcagtacatcaagtgtatcatatgccaagtacgccccctattgacgtcaatgacggtaaatggcccgcctggcattatgcccagtacatgaccttatgggactttcctacttggcagtacatctacgtattagtcatcgctattaccatgggtcgaggtgagccccacgttctgcttcactctccccatctcccccccctccccacccccaattttgtatttatttattttttaattattttgtgcagcgatgggggcggggggggggggggcgcgcgccaggcggggcggggcggggcgaggggcggggcggggcgaggcggagaggtgcggcggcagccaatcagagcggcgcgctccgaaagtttccttttatggcgaggcggcggcggcggcggccctataaaaagcgaagcgcgcggcgggcgggagtcgctgcgttgccttcgccccgtgccccgctccgcgccgcctcgcgccgcccgccccggctctgactgaccgcgttactcccacaggtgagcgggcgggacggcccttctcctccgggctgtaattagcgcttggtttaatgacggctcgtttcttttctgtggctgcgtgaaagccttaaagggctccgggagggccctttgtgcgggggggagcggctcggggggtgcgtgcgtgtgtgtgtgcgtggggagcgccgcgtgcggcccgcgctgcccggcggctgtgagcgctgcgggcgcggcgcggggctttgtgcgctccgcgtgtgcgcgaggggagcgcggccgggggcggtgccccgcggtgcgggggggctgcgaggggaacaaaggctgcgtgcggggtgtgtgcgtgggggggtgagcagggggtgtgggcgcggcggtcgggctgtaacccccccctgcacccccctccccgagttgctgagcacggcccggcttcgggtgcggggctccgtgcggggcgtggcgcggggctcgccgtgccgggcggggggtggcggcaggtgggggtgccgggcggggcggggccgcctcgggccggggagggctcgggggaggggcgcggcggcccccggagcgccggcgcatagctcttatgatagcaatgtcagcagtgcctttgagtctcagagatgcccgggttaagattctaaaattatcacgggtattacttgaggctcagaagtaaggttgaccatactctacagttgtgtctagagcctctgctaaccatgttcatgccttcttctttttcctacagctcctgggcaacgtgctggttattgtgaccggtcgctagccaccatggtgagcaagggcgaggagctgttcaccggggtggtgcccatcctggtcgagctggacggcgacgtaaacggccacaagttcagcgtgtccggcgagggcgagggcgatgccacctacggcaagctgaccctgaagttcatctgcaccaccggcaagctgcccgtgccctggcccaccctcgtgaccaccctgacctacggcgtgcagtgcttcagccgctaccccgaccacatgaagcagcacgacttcttcaagtccgccatgcccgaaggctacgtccaggagcgcaccatcttcttcaaggacgacggcaactacaagacccgcgccgaggtgaagttcgagggcgacaccctggtgaaccgcatcgagctgaagggcatcgacttcaaggaggacggcaacatcctggggcacaagctggagtacaactacaacagccacaacgtctatatcatggccgacaagcagaagaacggcatcaaggtgaacttcaagatccgccacaacatcgaggacggcagcgtgcagctcgccgaccactaccagcagaacacccccatcggcgacggccccgtgctgctgcccgacaaccactacctgagcacccagtccgccctgagcaaagaccccaacgagaagcgcgatcacatggtcctgctggagttcgtgaccgccgccgggatcactctcggcatggacgagctgtacaagtaacctgcaggcgccggcgcatagctcttatgatagcaatgtcagcagtgcctatactgtcatagtagtaccaggttaagattctaaaattatcatggtactaatgttggcagtgtaagtaaggttgaccatactctacagttgtggagctcgctgatcagcctcgactgtgccttctagttgccagccatctgttgtttgcccctcccccgtgccttccttgaccctggaaggtgccactcccactgtcctttcctaataaaatgaggaaattgcatcgcattgtctgagtaggtgtcattctattctggggggtggggtggggcaggacagcaagggggaggattgggaagacaatagcaggcatgctggggatgcggtgggctctatggaagcttgaattcagctgacgtgcctcggaccgctaggaacccctagtgatggagttggccactccctctctgcgcgctcgctcgctcactgaggccgggcgaccaaaggtcgcccgacgcccgggctttgcccgggcggcctcagtgagcgagcgagcgcgcag

SEQ ID NO: 182 - DNA, 2978 bp, synthetic construct
  misc_feature 1..2978: note = Description of Artificial Sequence: Syntheticpolynucleotide
  source 1..2978: mol_type = other DNA
ctgcgcgctcgctcgctcactgaggccgcccgggcgtcgggcgacctttggtcgcccggcctcagtgagcgagcgagcgcgcagagagggagtggccaactccatcactaggggttcctgcggccgcacgcgtgacattgattattgactagttattaatagtaatcaattacggggtcattagttcatagcccatatatggagttccgcgttacataacttacggtaaatggcccgcctggctgaccgcccaacgacccccgcccattgacgtcaataatgacgtatgttcccatagtaacgccaatagggactttccattgacgtcaatgggtggactatttacggtaaactgcccacttggcagtacatcaagtgtatcatatgccaagtacgccccctattgacgtcaatgacggtaaatggcccgcctggcattatgcccagtacatgaccttatgggactttcctacttggcagtacatctacgtattagtcatcgctattaccatgggtcgaggtgagccccacgttctgcttcactctccccatctcccccccctccccacccccaattttgtatttatttattttttaattattttgtgcagcgatgggggcggggggggggggggcgcgcgccaggcggggcggggcggggcgaggggcggggcggggcgaggcggagaggtgcggcggcagccaatcagagcggcgcgctccgaaagtttccttttatggcgaggcggcggcggcggcggccctataaaaagcgaagcgcgcggcgggcgggagtcgctgcgttgccttcgccccgtgccccgctccgcgccgcctcgcgccgcccgccccggctctgactgaccgcgttactcccacaggtgagcgggcgggacggcccttctcctccgggctgtaattagcgcttggtttaatgacggctcgtttcttttctgtggctgcgtgaaagccttaaagggctccgggagggccctttgtgcgggggggagcggctcggggggtgcgtgcgtgtgtgtgtgcgtggggagcgccgcgtgcggcccgcgctgcccggcggctgtgagcgctgcgggcgcggcgcggggctttgtgcgctccgcgtgtgcgcgaggggagcgcggccgggggcggtgccccgcggtgcgggggggctgcgaggggaacaaaggctgcgtgcggggtgtgtgcgtgggggggtgagcagggggtgtgggcgcggcggtcgggctgtaacccccccctgcacccccctccccgagttgctgagcacggcccggcttcgggtgcggggctccgtgcggggcgtggcgcggggctcgccgtgccgggcggggggtggcggcaggtgggggtgccgggcggggcggggccgcctcgggccggggagggctcgggggaggggcgcggcggcccccggagcgccggcggagcaggaggaccaaggccctggcgaaggccgtggcctcgttgagtctcagagatgcccggtgtgcaggtcccaatggccgggtattactgagattccacggggacgcgggcctggacgccggcatccgggctcaggacccccctctctagagcctctgctaaccatgttcatgccttcttctttttcctacagctcctgggcaacgtgctggttattgtgaccggtcgctagccaccatggtgagcaagggcgaggagctgttcaccggggtggtgcccatcctggtcgagctggacggcgacgtaaacggccacaagttcagcgtgtccggcgagggcgagggcgatgccacctacggcaagctgaccctgaagttcatctgcaccaccggcaagctgcccgtgccctggcccaccctcgtgaccaccctgacctacggcgtgcagtgcttcagccgctaccccgaccacatgaagcagcacgacttcttcaagtccgccatgcccgaaggctacgtccaggagcgcaccatcttcttcaaggacgacggcaactacaagacccgcgccgaggtgaagttcgagggcgacaccctggtgaaccgcatcgagctgaagggcatcgacttcaaggaggacggcaacatcctggggcacaagctggagtacaactacaacagccacaacgtctatatcatggccgacaagcagaagaacggcatcaaggtgaacttcaagatccgccacaacatcgaggacggcagcgtgcagctcgccgaccactaccagcagaacacccccatcggcgacggccccgtgctgctgcccgacaaccactacctgagcacccagtccgccctgagcaaagaccccaacgagaagcgcgatcacatggtcctgctggagttcgtgaccgccgccgggatcactctcggcatggacgagctgtacaagtaacctgcaggcgccggcggagcaggaggaccaaggccctggcgaaggccgtggcctcgatactgtcatagtagtaccagtgtgcaggtcccaatggctggtactaatgtgacagtctcggggacgcgggcctggacgccggcatccgggctcaggacccccctcgagctcgctgatcagcctcgactgtgccttctagttgccagccatctgttgtttgcccctcccccgtgccttccttgaccctggaaggtgccactcccactgtcctttcctaataaaatgaggaaattgcatcgcattgtctgagtaggtgtcattctattctggggggtggggtggggcaggacagcaagggggaggattgggaagacaatagcaggcatgctggggatgcggtgggctctatggaagcttgaattcagctgacgtgcctcggaccgctaggaacccctagtgatggagttggccactccctctctgcgcgctcgctcgctcactgaggccgggcgaccaaaggtcgcccgacgcccgggctttgcccgggcggcctcagtgagcgagcgagcgcgcag

SEQ ID NO: 183 - DNA, 2982 bp, synthetic construct
  misc_feature 1..2982: note = Description of Artificial Sequence: Syntheticpolynucleotide
  source 1..2982: mol_type = other DNA
ctgcgcgctcgctcgctcactgaggccgcccgggcgtcgggcgacctttggtcgcccggcctcagtgagcgagcgagcgcgcagagagggagtggccaactccatcactaggggttcctgcggccgcacgcgtgacattgattattgactagttattaatagtaatcaattacggggtcattagttcatagcccatatatggagttccgcgttacataacttacggtaaatggcccgcctggctgaccgcccaacgacccccgcccattgacgtcaataatgacgtatgttcccatagtaacgccaatagggactttccattgacgtcaatgggtggactatttacggtaaactgcccacttggcagtacatcaagtgtatcatatgccaagtacgccccctattgacgtcaatgacggtaaatggcccgcctggcattatgcccagtacatgaccttatgggactttcctacttggcagtacatctacgtattagtcatcgctattaccatgggtcgaggtgagccccacgttctgcttcactctccccatctcccccccctccccacccccaattttgtatttatttattttttaattattttgtgcagcgatgggggcggggggggggggggcgcgcgccaggcggggcggggcggggcgaggggcggggcggggcgaggcggagaggtgcggcggcagccaatcagagcggcgcgctccgaaagtttccttttatggcgaggcggcggcggcggcggccctataaaaagcgaagcgcgcggcgggcgggagtcgctgcgttgccttcgccccgtgccccgctccgcgccgcctcgcgccgcccgccccggctctgactgaccgcgttactcccacaggtgagcgggcgggacggcccttctcctccgggctgtaattagcgcttggtttaatgacggctcgtttcttttctgtggctgcgtgaaagccttaaagggctccgggagggccctttgtgcgggggggagcggctcggggggtgcgtgcgtgtgtgtgtgcgtggggagcgccgcgtgcggcccgcgctgcccggcggctgtgagcgctgcgggcgcggcgcggggctttgtgcgctccgcgtgtgcgcgaggggagcgcggccgggggcggtgccccgcggtgcgggggggctgcgaggggaacaaaggctgcgtgcggggtgtgtgcgtgggggggtgagcagggggtgtgggcgcggcggtcgggctgtaacccccccctgcacccccctccccgagttgctgagcacggcccggcttcgggtgcggggctccgtgcggggcgtggcgcggggctcgccgtgccgggcggggggtggcggcaggtgggggtgccgggcggggcggggccgcctcgggccggggagggctcgggggaggggcgcggcggcccccggagcgccggcggtgtccccagagagcccgcaccagtgccatctgcttggccgatttgagtctcagagatgcccggcttgtgtctctccgctctgagctgtctgtctcgaggctcatatgggaaaagcaggacccgcagctgcgtccgcctcccctgcattctagagcctctgctaaccatgttcatgccttcttctttttcctacagctcctgggcaacgtgctggttattgtgaccggtcgctagccaccatggtgagcaagggcgaggagctgttcaccggggtggtgcccatcctggtcgagctggacggcgacgtaaacggccacaagttcagcgtgtccggcgagggcgagggcgatgccacctacggcaagctgaccctgaagttcatctgcaccaccggcaagctgcccgtgccctggcccaccctcgtgaccaccctgacctacggcgtgcagtgcttcagccgctaccccgaccacatgaagcagcacgacttcttcaagtccgccatgcccgaaggctacgtccaggagcgcaccatcttcttcaaggacgacggcaactacaagacccgcgccgaggtgaagttcgagggcgacaccctggtgaaccgcatcgagctgaagggcatcgacttcaaggaggacggcaacatcctggggcacaagctggagtacaactacaacagccacaacgtctatatcatggccgacaagcagaagaacggcatcaaggtgaacttcaagatccgccacaacatcgaggacggcagcgtgcagctcgccgaccactaccagcagaacacccccatcggcgacggccccgtgctgctgcccgacaaccactacctgagcacccagtccgccctgagcaaagaccccaacgagaagcgcgatcacatggtcctgctggagttcgtgaccgccgccgggatcactctcggcatggacgagctgtacaagtaacctgcaggcgccggcggtgtccccagagagcccgcaccagtgccatctgcttggccgatatactgtcatagtagtaccagcttgtgtctctccgctctgagctgtcactgcttgacggtaaatgggaaaagcaggacccgcagctgcgtccgcctcccctgcatgagctcgctgatcagcctcgactgtgccttctagttgccagccatctgttgtttgcccctcccccgtgccttccttgaccctggaaggtgccactcccactgtcctttcctaataaaatgaggaaattgcatcgcattgtctgagtaggtgtcattctattctggggggtggggtggggcaggacagcaagggggaggattgggaagacaatagcaggcatgctggggatgcggtgggctctatggaagcttgaattcagctgacgtgcctcggaccgctaggaacccctagtgatggagttggccactccctctctgcgcgctcgctcgctcactgaggccgggcgaccaaaggtcgcccgacgcccgggctttgcccgggcggcctcagtgagcgagcgagcgcgcag

SEQ ID NO: 184 - DNA, 2940 bp, synthetic construct
  misc_feature 1..2940: note = Description of Artificial Sequence: Syntheticpolynucleotide
  source 1..2940: mol_type = other DNA
ctgcgcgctcgctcgctcactgaggccgcccgggcgtcgggcgacctttggtcgcccggcctcagtgagcgagcgagcgcgcagagagggagtggccaactccatcactaggggttcctgcggccgcacgcgtgacattgattattgactagttattaatagtaatcaattacggggtcattagttcatagcccatatatggagttccgcgttacataacttacggtaaatggcccgcctggctgaccgcccaacgacccccgcccattgacgtcaataatgacgtatgttcccatagtaacgccaatagggactttccattgacgtcaatgggtggactatttacggtaaactgcccacttggcagtacatcaagtgtatcatatgccaagtacgccccctattgacgtcaatgacggtaaatggcccgcctggcattatgcccagtacatgaccttatgggactttcctacttggcagtacatctacgtattagtcatcgctattaccatgggtcgaggtgagccccacgttctgcttcactctccccatctcccccccctccccacccccaattttgtatttatttattttttaattattttgtgcagcgatgggggcggggggggggggggcgcgcgccaggcggggcggggcggggcgaggggcggggcggggcgaggcggagaggtgcggcggcagccaatcagagcggcgcgctccgaaagtttccttttatggcgaggcggcggcggcggcggccctataaaaagcgaagcgcgcggcgggcgggagtcgctgcgttgccttcgccccgtgccccgctccgcgccgcctcgcgccgcccgccccggctctgactgaccgcgttactcccacaggtgagcgggcgggacggcccttctcctccgggctgtaattagcgcttggtttaatgacggctcgtttcttttctgtggctgcgtgaaagccttaaagggctccgggagggccctttgtgcgggggggagcggctcggggggtgcgtgcgtgtgtgtgtgcgtggggagcgccgcgtgcggcccgcgctgcccggcggctgtgagcgctgcgggcgcggcgcggggctttgtgcgctccgcgtgtgcgcgaggggagcgcggccgggggcggtgccccgcggtgcgggggggctgcgaggggaacaaaggctgcgtgcggggtgtgtgcgtgggggggtgagcagggggtgtgggcgcggcggtcgggctgtaacccccccctgcacccccctccccgagttgctgagcacggcccggcttcgggtgcggggctccgtgcggggcgtggcgcggggctcgccgtgccgggcggggggtggcggcaggtgggggtgccgggcggggcggggccgcctcgggccggggagggctcgggggaggggcgcggcggcccccggagcgccggcgcatagctcttatgatagcaatgtcagcagtgcctttctcgaagtgcttctgccgggttaagattctaaaattatcacggtagaaacatcttcgggagaagtaaggttgaccatactctacagttgtgtctagagcctctgctaaccatgttcatgccttcttctttttcctacagctcctgggcaacgtgctggttattgtgaccggtcgctagccaccatggtgagcaagggcgaggagctgttcaccggggtggtgcccatcctggtcgagctggacggcgacgtaaacggccacaagttcagcgtgtccggcgagggcgagggcgatgccacctacggcaagctgaccctgaagttcatctgcaccaccggcaagctgcccgtgccctggcccaccctcgtgaccaccctgacctacggcgtgcagtgcttcagccgctaccccgaccacatgaagcagcacgacttcttcaagtccgccatgcccgaaggctacgtccaggagcgcaccatcttcttcaaggacgacggcaactacaagacccgcgccgaggtgaagttcgagggcgacaccctggtgaaccgcatcgagctgaagggcatcgacttcaaggaggacggcaacatcctggggcacaagctggagtacaactacaacagccacaacgtctatatcatggccgacaagcagaagaacggcatcaaggtgaacttcaagatccgccacaacatcgaggacggcagcgtgcagctcgccgaccactaccagcagaacacccccatcggcgacggccccgtgctgctgcccgacaaccactacctgagcacccagtccgccctgagcaaagaccccaacgagaagcgcgatcacatggtcctgctggagttcgtgaccgccgccgggatcactctcggcatggacgagctgtacaagtaacctgcaggcgccggcgcatagctcttatgatagcaatgtcagcagtgcctttctcgaagtgcttctgccgggttaagattctaaaattatcacggtagaaacatcttcgggagaagtaaggttgaccatactctacagttgtggagctcgctgatcagcctcgactgtgccttctagttgccagccatctgttgtttgcccctcccccgtgccttccttgaccctggaaggtgccactcccactgtcctttcctaataaaatgaggaaattgcatcgcattgtctgagtaggtgtcattctattctggggggtggggtggggcaggacagcaagggggaggattgggaagacaatagcaggcatgctggggatgcggtgggctctatggaagcttgaattcagctgacgtgcctcggaccgctaggaacccctagtgatggagttggccactccctctctgcgcgctcgctcgctcactgaggccgggcgaccaaaggtcgcccgacgcccgggctttgcccgggcggcctcagtgagcgagcgagcgcgcag

SEQ ID NO: 185 - DNA, 2978 bp, synthetic construct
  misc_feature 1..2978: note = Description of Artificial Sequence: Syntheticpolynucleotide
  source 1..2978: mol_type = other DNA
ctgcgcgctcgctcgctcactgaggccgcccgggcgtcgggcgacctttggtcgcccggcctcagtgagcgagcgagcgcgcagagagggagtggccaactccatcactaggggttcctgcggccgcacgcgtgacattgattattgactagttattaatagtaatcaattacggggtcattagttcatagcccatatatggagttccgcgttacataacttacggtaaatggcccgcctggctgaccgcccaacgacccccgcccattgacgtcaataatgacgtatgttcccatagtaacgccaatagggactttccattgacgtcaatgggtggactatttacggtaaactgcccacttggcagtacatcaagtgtatcatatgccaagtacgccccctattgacgtcaatgacggtaaatggcccgcctggcattatgcccagtacatgaccttatgggactttcctacttggcagtacatctacgtattagtcatcgctattaccatgggtcgaggtgagccccacgttctgcttcactctccccatctcccccccctccccacccccaattttgtatttatttattttttaattattttgtgcagcgatgggggcggggggggggggggcgcgcgccaggcggggcggggcggggcgaggggcggggcggggcgaggcggagaggtgcggcggcagccaatcagagcggcgcgctccgaaagtttccttttatggcgaggcggcggcggcggcggccctataaaaagcgaagcgcgcggcgggcgggagtcgctgcgttgccttcgccccgtgccccgctccgcgccgcctcgcgccgcccgccccggctctgactgaccgcgttactcccacaggtgagcgggcgggacggcccttctcctccgggctgtaattagcgcttggtttaatgacggctcgtttcttttctgtggctgcgtgaaagccttaaagggctccgggagggccctttgtgcgggggggagcggctcggggggtgcgtgcgtgtgtgtgtgcgtggggagcgccgcgtgcggcccgcgctgcccggcggctgtgagcgctgcgggcgcggcgcggggctttgtgcgctccgcgtgtgcgcgaggggagcgcggccgggggcggtgccccgcggtgcgggggggctgcgaggggaacaaaggctgcgtgcggggtgtgtgcgtgggggggtgagcagggggtgtgggcgcggcggtcgggctgtaacccccccctgcacccccctccccgagttgctgagcacggcccggcttcgggtgcggggctccgtgcggggcgtggcgcggggctcgccgtgccgggcggggggtggcggcaggtgggggtgccgggcggggcggggccgcctcgggccggggagggctcgggggaggggcgcggcggcccccggagcgccggcggagcaggaggaccaaggccctggcgaaggccgtggcctcgttctcgaagtgcttctgccggtgtgcaggtcccaatggccggtagaatcgtttcgagcacggggacgcgggcctggacgccggcatccgggctcaggacccccctctctagagcctctgctaaccatgttcatgccttcttctttttcctacagctcctgggcaacgtgctggttattgtgaccggtcgctagccaccatggtgagcaagggcgaggagctgttcaccggggtggtgcccatcctggtcgagctggacggcgacgtaaacggccacaagttcagcgtgtccggcgagggcgagggcgatgccacctacggcaagctgaccctgaagttcatctgcaccaccggcaagctgcccgtgccctggcccaccctcgtgaccaccctgacctacggcgtgcagtgcttcagccgctaccccgaccacatgaagcagcacgacttcttcaagtccgccatgcccgaaggctacgtccaggagcgcaccatcttcttcaaggacgacggcaactacaagacccgcgccgaggtgaagttcgagggcgacaccctggtgaaccgcatcgagctgaagggcatcgacttcaaggaggacggcaacatcctggggcacaagctggagtacaactacaacagccacaacgtctatatcatggccgacaagcagaagaacggcatcaaggtgaacttcaagatccgccacaacatcgaggacggcagcgtgcagctcgccgaccactaccagcagaacacccccatcggcgacggccccgtgctgctgcccgacaaccactacctgagcacccagtccgccctgagcaaagaccccaacgagaagcgcgatcacatggtcctgctggagttcgtgaccgccgccgggatcactctcggcatggacgagctgtacaagtaacctgcaggcgccggcggagcaggaggaccaaggccctggcgaaggccgtggcctcgttctcgaagtgcttctgccggtgtgcaggtcccaatggccggtagaatcgtttcgagcacggggacgcgggcctggacgccggcatccgggctcaggacccccctcgagctcgctgatcagcctcgactgtgccttctagttgccagccatctgttgtttgcccctcccccgtgccttccttgaccctggaaggtgccactcccactgtcctttcctaataaaatgaggaaattgcatcgcattgtctgagtaggtgtcattctattctggggggtggggtggggcaggacagcaagggggaggattgggaagacaatagcaggcatgctggggatgcggtgggctctatggaagcttgaattcagctgacgtgcctcggaccgctaggaacccctagtgatggagttggccactccctctctgcgcgctcgctcgctcactgaggccgggcgaccaaaggtcgcccgacgcccgggctttgcccgggcggcctcagtgagcgagcgagcgcgcag

SEQ ID NO: 186 - DNA, 2982 bp, synthetic construct
  misc_feature 1..2982: note = Description of Artificial Sequence: Syntheticpolynucleotide
  source 1..2982: mol_type = other DNA
ctgcgcgctcgctcgctcactgaggccgcccgggcgtcgggcgacctttggtcgcccggcctcagtgagcgagcgagcgcgcagagagggagtggccaactccatcactaggggttcctgcggccgcacgcgtgacattgattattgactagttattaatagtaatcaattacggggtcattagttcatagcccatatatggagttccgcgttacataacttacggtaaatggcccgcctggctgaccgcccaacgacccccgcccattgacgtcaataatgacgtatgttcccatagtaacgccaatagggactttccattgacgtcaatgggtggactatttacggtaaactgcccacttggcagtacatcaagtgtatcatatgccaagtacgccccctattgacgtcaatgacggtaaatggcccgcctggcattatgcccagtacatgaccttatgggactttcctacttggcagtacatctacgtattagtcatcgctattaccatgggtcgaggtgagccccacgttctgcttcactctccccatctcccccccctccccacccccaattttgtatttatttattttttaattattttgtgcagcgatgggggcggggggggggggggcgcgcgccaggcggggcggggcggggcgaggggcggggcggggcgaggcggagaggtgcggcggcagccaatcagagcggcgcgctccgaaagtttccttttatggcgaggcggcggcggcggcggccctataaaaagcgaagcgcgcggcgggcgggagtcgctgcgttgccttcgccccgtgccccgctccgcgccgcctcgcgccgcccgccccggctctgactgaccgcgttactcccacaggtgagcgggcgggacggcccttctcctccgggctgtaattagcgcttggtttaatgacggctcgtttcttttctgtggctgcgtgaaagccttaaagggctccgggagggccctttgtgcgggggggagcggctcggggggtgcgtgcgtgtgtgtgtgcgtggggagcgccgcgtgcggcccgcgctgcccggcggctgtgagcgctgcgggcgcggcgcggggctttgtgcgctccgcgtgtgcgcgaggggagcgcggccgggggcggtgccccgcggtgcgggggggctgcgaggggaacaaaggctgcgtgcggggtgtgtgcgtgggggggtgagcagggggtgtgggcgcggcggtcgggctgtaacccccccctgcacccccctccccgagttgctgagcacggcccggcttcgggtgcggggctccgtgcggggcgtggcgcggggctcgccgtgccgggcggggggtggcggcaggtgggggtgccgggcggggcggggccgcctcgggccggggagggctcgggggaggggcgcggcggcccccggagcgccggcggtgtccccagagagcccgcaccagtgccatctgcttggccgatttctcgaagtgcttctgccggcttgtgtctctccgctctgagctgtgaggagctttcgggatatgggaaaagcaggacccgcagctgcgtccgcctcccctgcattctagagcctctgctaaccatgttcatgccttcttctttttcctacagctcctgggcaacgtgctggttattgtgaccggtcgctagccaccatggtgagcaagggcgaggagctgttcaccggggtggtgcccatcctggtcgagctggacggcgacgtaaacggccacaagttcagcgtgtccggcgagggcgagggcgatgccacctacggcaagctgaccctgaagttcatctgcaccaccggcaagctgcccgtgccctggcccaccctcgtgaccaccctgacctacggcgtgcagtgcttcagccgctaccccgaccacatgaagcagcacgacttcttcaagtccgccatgcccgaaggctacgtccaggagcgcaccatcttcttcaaggacgacggcaactacaagacccgcgccgaggtgaagttcgagggcgacaccctggtgaaccgcatcgagctgaagggcatcgacttcaaggaggacggcaacatcctggggcacaagctggagtacaactacaacagccacaacgtctatatcatggccgacaagcagaagaacggcatcaaggtgaacttcaagatccgccacaacatcgaggacggcagcgtgcagctcgccgaccactaccagcagaacacccccatcggcgacggccccgtgctgctgcccgacaaccactacctgagcacccagtccgccctgagcaaagaccccaacgagaagcgcgatcacatggtcctgctggagttcgtgaccgccgccgggatcactctcggcatggacgagctgtacaagtaacctgcaggcgccggcggtgtccccagagagcccgcaccagtgccatctgcttggccgatttctcgaagtgcttctgccggcttgtgtctctccgctctgagctgtgaggagctttcgggatatgggaaaagcaggacccgcagctgcgtccgcctcccctgcatgagctcgctgatcagcctcgactgtgccttctagttgccagccatctgttgtttgcccctcccccgtgccttccttgaccctggaaggtgccactcccactgtcctttcctaataaaatgaggaaattgcatcgcattgtctgagtaggtgtcattctattctggggggtggggtggggcaggacagcaagggggaggattgggaagacaatagcaggcatgctggggatgcggtgggctctatggaagcttgaattcagctgacgtgcctcggaccgctaggaacccctagtgatggagttggccactccctctctgcgcgctcgctcgctcactgaggccgggcgaccaaaggtcgcccgacgcccgggctttgcccgggcggcctcagtgagcgagcgagcgcgcag

SEQ ID NO: 187 - DNA, 2940 bp, synthetic construct
  misc_feature 1..2940: note = Description of Artificial Sequence: Syntheticpolynucleotide
  source 1..2940: mol_type = other DNA
ctgcgcgctcgctcgctcactgaggccgcccgggcgtcgggcgacctttggtcgcccggcctcagtgagcgagcgagcgcgcagagagggagtggccaactccatcactaggggttcctgcggccgcacgcgtgacattgattattgactagttattaatagtaatcaattacggggtcattagttcatagcccatatatggagttccgcgttacataacttacggtaaatggcccgcctggctgaccgcccaacgacccccgcccattgacgtcaataatgacgtatgttcccatagtaacgccaatagggactttccattgacgtcaatgggtggactatttacggtaaactgcccacttggcagtacatcaagtgtatcatatgccaagtacgccccctattgacgtcaatgacggtaaatggcccgcctggcattatgcccagtacatgaccttatgggactttcctacttggcagtacatctacgtattagtcatcgctattaccatgggtcgaggtgagccccacgttctgcttcactctccccatctcccccccctccccacccccaattttgtatttatttattttttaattattttgtgcagcgatgggggcggggggggggggggcgcgcgccaggcggggcggggcggggcgaggggcggggcggggcgaggcggagaggtgcggcggcagccaatcagagcggcgcgctccgaaagtttccttttatggcgaggcggcggcggcggcggccctataaaaagcgaagcgcgcggcgggcgggagtcgctgcgttgccttcgccccgtgccccgctccgcgccgcctcgcgccgcccgccccggctctgactgaccgcgttactcccacaggtgagcgggcgggacggcccttctcctccgggctgtaattagcgcttggtttaatgacggctcgtttcttttctgtggctgcgtgaaagccttaaagggctccgggagggccctttgtgcgggggggagcggctcggggggtgcgtgcgtgtgtgtgtgcgtggggagcgccgcgtgcggcccgcgctgcccggcggctgtgagcgctgcgggcgcggcgcggggctttgtgcgctccgcgtgtgcgcgaggggagcgcggccgggggcggtgccccgcggtgcgggggggctgcgaggggaacaaaggctgcgtgcggggtgtgtgcgtgggggggtgagcagggggtgtgggcgcggcggtcgggctgtaacccccccctgcacccccctccccgagttgctgagcacggcccggcttcgggtgcggggctccgtgcggggcgtggcgcggggctcgccgtgccgggcggggggtggcggcaggtgggggtgccgggcggggcggggccgcctcgggccggggagggctcgggggaggggcgcggcggcccccggagcgccggcgcatagctcttatgatagcaatgtcagcagtgcctttctcgaagtgcttctgccgggttaagattctaaaattatcacggtagaaacatcttcgggagaagtaaggttgaccatactctacagttgtgtctagagcctctgctaaccatgttcatgccttcttctttttcctacagctcctgggcaacgtgctggttattgtgaccggtcgctagccaccatggtgagcaagggcgaggagctgttcaccggggtggtgcccatcctggtcgagctggacggcgacgtaaacggccacaagttcagcgtgtccggcgagggcgagggcgatgccacctacggcaagctgaccctgaagttcatctgcaccaccggcaagctgcccgtgccctggcccaccctcgtgaccaccctgacctacggcgtgcagtgcttcagccgctaccccgaccacatgaagcagcacgacttcttcaagtccgccatgcccgaaggctacgtccaggagcgcaccatcttcttcaaggacgacggcaactacaagacccgcgccgaggtgaagttcgagggcgacaccctggtgaaccgcatcgagctgaagggcatcgacttcaaggaggacggcaacatcctggggcacaagctggagtacaactacaacagccacaacgtctatatcatggccgacaagcagaagaacggcatcaaggtgaacttcaagatccgccacaacatcgaggacggcagcgtgcagctcgccgaccactaccagcagaacacccccatcggcgacggccccgtgctgctgcccgacaaccactacctgagcacccagtccgccctgagcaaagaccccaacgagaagcgcgatcacatggtcctgctggagttcgtgaccgccgccgggatcactctcggcatggacgagctgtacaagtaacctgcaggcgccggcgcatagctcttatgatagcaatgtcagcagtgcctttctccaccttgaccacgcgtgttaagattctaaaattatctcgtgtggtaagtggtggagagaagtaaggttgaccatactctacagttgtggagctcgctgatcagcctcgactgtgccttctagttgccagccatctgttgtttgcccctcccccgtgccttccttgaccctggaaggtgccactcccactgtcctttcctaataaaatgaggaaattgcatcgcattgtctgagtaggtgtcattctattctggggggtggggtggggcaggacagcaagggggaggattgggaagacaatagcaggcatgctggggatgcggtgggctctatggaagcttgaattcagctgacgtgcctcggaccgctaggaacccctagtgatggagttggccactccctctctgcgcgctcgctcgctcactgaggccgggcgaccaaaggtcgcccgacgcccgggctttgcccgggcggcctcagtgagcgagcgagcgcgcag

SEQ ID NO: 188 - DNA, 2978 bp, synthetic construct
  misc_feature 1..2978: note = Description of Artificial Sequence: Syntheticpolynucleotide
  source 1..2978: mol_type = other DNA
ctgcgcgctcgctcgctcactgaggccgcccgggcgtcgggcgacctttggtcgcccggcctcagtgagcgagcgagcgcgcagagagggagtggccaactccatcactaggggttcctgcggccgcacgcgtgacattgattattgactagttattaatagtaatcaattacggggtcattagttcatagcccatatatggagttccgcgttacataacttacggtaaatggcccgcctggctgaccgcccaacgacccccgcccattgacgtcaataatgacgtatgttcccatagtaacgccaatagggactttccattgacgtcaatgggtggactatttacggtaaactgcccacttggcagtacatcaagtgtatcatatgccaagtacgccccctattgacgtcaatgacggtaaatggcccgcctggcattatgcccagtacatgaccttatgggactttcctacttggcagtacatctacgtattagtcatcgctattaccatgggtcgaggtgagccccacgttctgcttcactctccccatctcccccccctccccacccccaattttgtatttatttattttttaattattttgtgcagcgatgggggcggggggggggggggcgcgcgccaggcggggcggggcggggcgaggggcggggcggggcgaggcggagaggtgcggcggcagccaatcagagcggcgcgctccgaaagtttccttttatggcgaggcggcggcggcggcggccctataaaaagcgaagcgcgcggcgggcgggagtcgctgcgttgccttcgccccgtgccccgctccgcgccgcctcgcgccgcccgccccggctctgactgaccgcgttactcccacaggtgagcgggcgggacggcccttctcctccgggctgtaattagcgcttggtttaatgacggctcgtttcttttctgtggctgcgtgaaagccttaaagggctccgggagggccctttgtgcgggggggagcggctcggggggtgcgtgcgtgtgtgtgtgcgtggggagcgccgcgtgcggcccgcgctgcccggcggctgtgagcgctgcgggcgcggcgcggggctttgtgcgctccgcgtgtgcgcgaggggagcgcggccgggggcggtgccccgcggtgcgggggggctgcgaggggaacaaaggctgcgtgcggggtgtgtgcgtgggggggtgagcagggggtgtgggcgcggcggtcgggctgtaacccccccctgcacccccctccccgagttgctgagcacggcccggcttcgggtgcggggctccgtgcggggcgtggcgcggggctcgccgtgccgggcggggggtggcggcaggtgggggtgccgggcggggcggggccgcctcgggccggggagggctcgggggaggggcgcggcggcccccggagcgccggcggagcaggaggaccaaggccctggcgaaggccgtggcctcgttctcgaagtgcttctgccggtgtgcaggtcccaatggccggtagaatcgtttcgagcacggggacgcgggcctggacgccggcatccgggctcaggacccccctctctagagcctctgctaaccatgttcatgccttcttctttttcctacagctcctgggcaacgtgctggttattgtgaccggtcgctagccaccatggtgagcaagggcgaggagctgttcaccggggtggtgcccatcctggtcgagctggacggcgacgtaaacggccacaagttcagcgtgtccggcgagggcgagggcgatgccacctacggcaagctgaccctgaagttcatctgcaccaccggcaagctgcccgtgccctggcccaccctcgtgaccaccctgacctacggcgtgcagtgcttcagccgctaccccgaccacatgaagcagcacgacttcttcaagtccgccatgcccgaaggctacgtccaggagcgcaccatcttcttcaaggacgacggcaactacaagacccgcgccgaggtgaagttcgagggcgacaccctggtgaaccgcatcgagctgaagggcatcgacttcaaggaggacggcaacatcctggggcacaagctggagtacaactacaacagccacaacgtctatatcatggccgacaagcagaagaacggcatcaaggtgaacttcaagatccgccacaacatcgaggacggcagcgtgcagctcgccgaccactaccagcagaacacccccatcggcgacggccccgtgctgctgcccgacaaccactacctgagcacccagtccgccctgagcaaagaccccaacgagaagcgcgatcacatggtcctgctggagttcgtgaccgccgccgggatcactctcggcatggacgagctgtacaagtaacctgcaggcgccggcggagcaggaggaccaaggccctggcgaaggccgtggcctcgttctccaccttgaccacgcgttgtgcaggtcccaatgggcgtgtggtagaggtggagcacggggacgcgggcctggacgccggcatccgggctcaggacccccctcgagctcgctgatcagcctcgactgtgccttctagttgccagccatctgttgtttgcccctcccccgtgccttccttgaccctggaaggtgccactcccactgtcctttcctaataaaatgaggaaattgcatcgcattgtctgagtaggtgtcattctattctggggggtggggtggggcaggacagcaagggggaggattgggaagacaatagcaggcatgctggggatgcggtgggctctatggaagcttgaattcagctgacgtgcctcggaccgctaggaacccctagtgatggagttggccactccctctctgcgcgctcgctcgctcactgaggccgggcgaccaaaggtcgcccgacgcccgggctttgcccgggcggcctcagtgagcgagcgagcgcgcag

SEQ ID NO: 189 - DNA, 2982 bp, synthetic construct
  misc_feature 1..2982: note = Description of Artificial Sequence: Syntheticpolynucleotide
  source 1..2982: mol_type = other DNA
ctgcgcgctcgctcgctcactgaggccgcccgggcgtcgggcgacctttggtcgcccggcctcagtgagcgagcgagcgcgcagagagggagtggccaactccatcactaggggttcctgcggccgcacgcgtgacattgattattgactagttattaatagtaatcaattacggggtcattagttcatagcccatatatggagttccgcgttacataacttacggtaaatggcccgcctggctgaccgcccaacgacccccgcccattgacgtcaataatgacgtatgttcccatagtaacgccaatagggactttccattgacgtcaatgggtggactatttacggtaaactgcccacttggcagtacatcaagtgtatcatatgccaagtacgccccctattgacgtcaatgacggtaaatggcccgcctggcattatgcccagtacatgaccttatgggactttcctacttggcagtacatctacgtattagtcatcgctattaccatgggtcgaggtgagccccacgttctgcttcactctccccatctcccccccctccccacccccaattttgtatttatttattttttaattattttgtgcagcgatgggggcggggggggggggggcgcgcgccaggcggggcggggcggggcgaggggcggggcggggcgaggcggagaggtgcggcggcagccaatcagagcggcgcgctccgaaagtttccttttatggcgaggcggcggcggcggcggccctataaaaagcgaagcgcgcggcgggcgggagtcgctgcgttgccttcgccccgtgccccgctccgcgccgcctcgcgccgcccgccccggctctgactgaccgcgttactcccacaggtgagcgggcgggacggcccttctcctccgggctgtaattagcgcttggtttaatgacggctcgtttcttttctgtggctgcgtgaaagccttaaagggctccgggagggccctttgtgcgggggggagcggctcggggggtgcgtgcgtgtgtgtgtgcgtggggagcgccgcgtgcggcccgcgctgcccggcggctgtgagcgctgcgggcgcggcgcggggctttgtgcgctccgcgtgtgcgcgaggggagcgcggccgggggcggtgccccgcggtgcgggggggctgcgaggggaacaaaggctgcgtgcggggtgtgtgcgtgggggggtgagcagggggtgtgggcgcggcggtcgggctgtaacccccccctgcacccccctccccgagttgctgagcacggcccggcttcgggtgcggggctccgtgcggggcgtggcgcggggctcgccgtgccgggcggggggtggcggcaggtgggggtgccgggcggggcggggccgcctcgggccggggagggctcgggggaggggcgcggcggcccccggagcgccggcggtgtccccagagagcccgcaccagtgccatctgcttggccgatttctcgaagtgcttctgccggcttgtgtctctccgctctgagctgtgaggagctttcgggatatgggaaaagcaggacccgcagctgcgtccgcctcccctgcattctagagcctctgctaaccatgttcatgccttcttctttttcctacagctcctgggcaacgtgctggttattgtgaccggtcgctagccaccatggtgagcaagggcgaggagctgttcaccggggtggtgcccatcctggtcgagctggacggcgacgtaaacggccacaagttcagcgtgtccggcgagggcgagggcgatgccacctacggcaagctgaccctgaagttcatctgcaccaccggcaagctgcccgtgccctggcccaccctcgtgaccaccctgacctacggcgtgcagtgcttcagccgctaccccgaccacatgaagcagcacgacttcttcaagtccgccatgcccgaaggctacgtccaggagcgcaccatcttcttcaaggacgacggcaactacaagacccgcgccgaggtgaagttcgagggcgacaccctggtgaaccgcatcgagctgaagggcatcgacttcaaggaggacggcaacatcctggggcacaagctggagtacaactacaacagccacaacgtctatatcatggccgacaagcagaagaacggcatcaaggtgaacttcaagatccgccacaacatcgaggacggcagcgtgcagctcgccgaccactaccagcagaacacccccatcggcgacggccccgtgctgctgcccgacaaccactacctgagcacccagtccgccctgagcaaagaccccaacgagaagcgcgatcacatggtcctgctggagttcgtgaccgccgccgggatcactctcggcatggacgagctgtacaagtaacctgcaggcgccggcggtgtccccagagagcccgcaccagtgccatctgcttggccgatttctccaccttgaccacgcgtcttgtgtctctccgctctgaggtgactggttgggtggagatatgggaaaagcaggacccgcagctgcgtccgcctcccctgcatgagctcgctgatcagcctcgactgtgccttctagttgccagccatctgttgtttgcccctcccccgtgccttccttgaccctggaaggtgccactcccactgtcctttcctaataaaatgaggaaattgcatcgcattgtctgagtaggtgtcattctattctggggggtggggtggggcaggacagcaagggggaggattgggaagacaatagcaggcatgctggggatgcggtgggctctatggaagcttgaattcagctgacgtgcctcggaccgctaggaacccctagtgatggagttggccactccctctctgcgcgctcgctcgctcactgaggccgggcgaccaaaggtcgcccgacgcccgggctttgcccgggcggcctcagtgagcgagcgagcgcgcag

SEQ ID NO: 190 - DNA, 2940 bp, synthetic construct
  misc_feature 1..2940: note = Description of Artificial Sequence: Syntheticpolynucleotide
  source 1..2940: mol_type = other DNA
ctgcgcgctcgctcgctcactgaggccgcccgggcgtcgggcgacctttggtcgcccggcctcagtgagcgagcgagcgcgcagagagggagtggccaactccatcactaggggttcctgcggccgcacgcgtgacattgattattgactagttattaatagtaatcaattacggggtcattagttcatagcccatatatggagttccgcgttacataacttacggtaaatggcccgcctggctgaccgcccaacgacccccgcccattgacgtcaataatgacgtatgttcccatagtaacgccaatagggactttccattgacgtcaatgggtggactatttacggtaaactgcccacttggcagtacatcaagtgtatcatatgccaagtacgccccctattgacgtcaatgacggtaaatggcccgcctggcattatgcccagtacatgaccttatgggactttcctacttggcagtacatctacgtattagtcatcgctattaccatgggtcgaggtgagccccacgttctgcttcactctccccatctcccccccctccccacccccaattttgtatttatttattttttaattattttgtgcagcgatgggggcggggggggggggggcgcgcgccaggcggggcggggcggggcgaggggcggggcggggcgaggcggagaggtgcggcggcagccaatcagagcggcgcgctccgaaagtttccttttatggcgaggcggcggcggcggcggccctataaaaagcgaagcgcgcggcgggcgggagtcgctgcgttgccttcgccccgtgccccgctccgcgccgcctcgcgccgcccgccccggctctgactgaccgcgttactcccacaggtgagcgggcgggacggcccttctcctccgggctgtaattagcgcttggtttaatgacggctcgtttcttttctgtggctgcgtgaaagccttaaagggctccgggagggccctttgtgcgggggggagcggctcggggggtgcgtgcgtgtgtgtgtgcgtggggagcgccgcgtgcggcccgcgctgcccggcggctgtgagcgctgcgggcgcggcgcggggctttgtgcgctccgcgtgtgcgcgaggggagcgcggccgggggcggtgccccgcggtgcgggggggctgcgaggggaacaaaggctgcgtgcggggtgtgtgcgtgggggggtgagcagggggtgtgggcgcggcggtcgggctgtaacccccccctgcacccccctccccgagttgctgagcacggcccggcttcgggtgcggggctccgtgcggggcgtggcgcggggctcgccgtgccgggcggggggtggcggcaggtgggggtgccgggcggggcggggccgcctcgggccggggagggctcgggggaggggcgcggcggcccccggagcgccggcgcatagctcttatgatagcaatgtcagcagtgcctttctcgaagtgcttctgccgggttaagattctaaaattatcacggtagaaacatcttcgggagaagtaaggttgaccatactctacagttgtgtctagagcctctgctaaccatgttcatgccttcttctttttcctacagctcctgggcaacgtgctggttattgtgaccggtcgctagccaccatggtgagcaagggcgaggagctgttcaccggggtggtgcccatcctggtcgagctggacggcgacgtaaacggccacaagttcagcgtgtccggcgagggcgagggcgatgccacctacggcaagctgaccctgaagttcatctgcaccaccggcaagctgcccgtgccctggcccaccctcgtgaccaccctgacctacggcgtgcagtgcttcagccgctaccccgaccacatgaagcagcacgacttcttcaagtccgccatgcccgaaggctacgtccaggagcgcaccatcttcttcaaggacgacggcaactacaagacccgcgccgaggtgaagttcgagggcgacaccctggtgaaccgcatcgagctgaagggcatcgacttcaaggaggacggcaacatcctggggcacaagctggagtacaactacaacagccacaacgtctatatcatggccgacaagcagaagaacggcatcaaggtgaacttcaagatccgccacaacatcgaggacggcagcgtgcagctcgccgaccactaccagcagaacacccccatcggcgacggccccgtgctgctgcccgacaaccactacctgagcacccagtccgccctgagcaaagaccccaacgagaagcgcgatcacatggtcctgctggagttcgtgaccgccgccgggatcactctcggcatggacgagctgtacaagtaacctgcaggcgccggcgcatagctcttatgatagcaatgtcagcagtgcctatactgtcatagtagtaccaggttaagattctaaaattatcatggtactaatgttggcagtgtaagtaaggttgaccatactctacagttgtggagctcgctgatcagcctcgactgtgccttctagttgccagccatctgttgtttgcccctcccccgtgccttccttgaccctggaaggtgccactcccactgtcctttcctaataaaatgaggaaattgcatcgcattgtctgagtaggtgtcattctattctggggggtggggtggggcaggacagcaagggggaggattgggaagacaatagcaggcatgctggggatgcggtgggctctatggaagcttgaattcagctgacgtgcctcggaccgctaggaacccctagtgatggagttggccactccctctctgcgcgctcgctcgctcactgaggccgggcgaccaaaggtcgcccgacgcccgggctttgcccgggcggcctcagtgagcgagcgagcgcgcag

SEQ ID NO: 191 - DNA, 2978 bp, synthetic construct
  misc_feature 1..2978: note = Description of Artificial Sequence: Syntheticpolynucleotide
  source 1..2978: mol_type = other DNA
ctgcgcgctcgctcgctcactgaggccgcccgggcgtcgggcgacctttggtcgcccggcctcagtgagcgagcgagcgcgcagagagggagtggccaactccatcactaggggttcctgcggccgcacgcgtgacattgattattgactagttattaatagtaatcaattacggggtcattagttcatagcccatatatggagttccgcgttacataacttacggtaaatggcccgcctggctgaccgcccaacgacccccgcccattgacgtcaataatgacgtatgttcccatagtaacgccaatagggactttccattgacgtcaatgggtggactatttacggtaaactgcccacttggcagtacatcaagtgtatcatatgccaagtacgccccctattgacgtcaatgacggtaaatggcccgcctggcattatgcccagtacatgaccttatgggactttcctacttggcagtacatctacgtattagtcatcgctattaccatgggtcgaggtgagccccacgttctgcttcactctccccatctcccccccctccccacccccaattttgtatttatttattttttaattattttgtgcagcgatgggggcggggggggggggggcgcgcgccaggcggggcggggcggggcgaggggcggggcggggcgaggcggagaggtgcggcggcagccaatcagagcggcgcgctccgaaagtttccttttatggcgaggcggcggcggcggcggccctataaaaagcgaagcgcgcggcgggcgggagtcgctgcgttgccttcgccccgtgccccgctccgcgccgcctcgcgccgcccgccccggctctgactgaccgcgttactcccacaggtgagcgggcgggacggcccttctcctccgggctgtaattagcgcttggtttaatgacggctcgtttcttttctgtggctgcgtgaaagccttaaagggctccgggagggccctttgtgcgggggggagcggctcggggggtgcgtgcgtgtgtgtgtgcgtggggagcgccgcgtgcggcccgcgctgcccggcggctgtgagcgctgcgggcgcggcgcggggctttgtgcgctccgcgtgtgcgcgaggggagcgcggccgggggcggtgccccgcggtgcgggggggctgcgaggggaacaaaggctgcgtgcggggtgtgtgcgtgggggggtgagcagggggtgtgggcgcggcggtcgggctgtaacccccccctgcacccccctccccgagttgctgagcacggcccggcttcgggtgcggggctccgtgcggggcgtggcgcggggctcgccgtgccgggcggggggtggcggcaggtgggggtgccgggcggggcggggccgcctcgggccggggagggctcgggggaggggcgcggcggcccccggagcgccggcggagcaggaggaccaaggccctggcgaaggccgtggcctcgttctcgaagtgcttctgccggtgtgcaggtcccaatggccggtagaatcgtttcgagcacggggacgcgggcctggacgccggcatccgggctcaggacccccctctctagagcctctgctaaccatgttcatgccttcttctttttcctacagctcctgggcaacgtgctggttattgtgaccggtcgctagccaccatggtgagcaagggcgaggagctgttcaccggggtggtgcccatcctggtcgagctggacggcgacgtaaacggccacaagttcagcgtgtccggcgagggcgagggcgatgccacctacggcaagctgaccctgaagttcatctgcaccaccggcaagctgcccgtgccctggcccaccctcgtgaccaccctgacctacggcgtgcagtgcttcagccgctaccccgaccacatgaagcagcacgacttcttcaagtccgccatgcccgaaggctacgtccaggagcgcaccatcttcttcaaggacgacggcaactacaagacccgcgccgaggtgaagttcgagggcgacaccctggtgaaccgcatcgagctgaagggcatcgacttcaaggaggacggcaacatcctggggcacaagctggagtacaactacaacagccacaacgtctatatcatggccgacaagcagaagaacggcatcaaggtgaacttcaagatccgccacaacatcgaggacggcagcgtgcagctcgccgaccactaccagcagaacacccccatcggcgacggccccgtgctgctgcccgacaaccactacctgagcacccagtccgccctgagcaaagaccccaacgagaagcgcgatcacatggtcctgctggagttcgtgaccgccgccgggatcactctcggcatggacgagctgtacaagtaacctgcaggcgccggcggagcaggaggaccaaggccctggcgaaggccgtggcctcgatactgtcatagtagtaccagtgtgcaggtcccaatggctggtactaatgtgacagtctcggggacgcgggcctggacgccggcatccgggctcaggacccccctcgagctcgctgatcagcctcgactgtgccttctagttgccagccatctgttgtttgcccctcccccgtgccttccttgaccctggaaggtgccactcccactgtcctttcctaataaaatgaggaaattgcatcgcattgtctgagtaggtgtcattctattctggggggtggggtggggcaggacagcaagggggaggattgggaagacaatagcaggcatgctggggatgcggtgggctctatggaagcttgaattcagctgacgtgcctcggaccgctaggaacccctagtgatggagttggccactccctctctgcgcgctcgctcgctcactgaggccgggcgaccaaaggtcgcccgacgcccgggctttgcccgggcggcctcagtgagcgagcgagcgcgcag

SEQ ID NO: 192 - DNA, 2982 bp, synthetic construct
  misc_feature 1..2982: note = Description of Artificial Sequence: Syntheticpolynucleotide
  source 1..2982: mol_type = other DNA
ctgcgcgctcgctcgctcactgaggccgcccgggcgtcgggcgacctttggtcgcccggcctcagtgagcgagcgagcgcgcagagagggagtggccaactccatcactaggggttcctgcggccgcacgcgtgacattgattattgactagttattaatagtaatcaattacggggtcattagttcatagcccatatatggagttccgcgttacataacttacggtaaatggcccgcctggctgaccgcccaacgacccccgcccattgacgtcaataatgacgtatgttcccatagtaacgccaatagggactttccattgacgtcaatgggtggactatttacggtaaactgcccacttggcagtacatcaagtgtatcatatgccaagtacgccccctattgacgtcaatgacggtaaatggcccgcctggcattatgcccagtacatgaccttatgggactttcctacttggcagtacatctacgtattagtcatcgctattaccatgggtcgaggtgagccccacgttctgcttcactctccccatctcccccccctccccacccccaattttgtatttatttattttttaattattttgtgcagcgatgggggcggggggggggggggcgcgcgccaggcggggcggggcggggcgaggggcggggcggggcgaggcggagaggtgcggcggcagccaatcagagcggcgcgctccgaaagtttccttttatggcgaggcggcggcggcggcggccctataaaaagcgaagcgcgcggcgggcgggagtcgctgcgttgccttcgccccgtgccccgctccgcgccgcctcgcgccgcccgccccggctctgactgaccgcgttactcccacaggtgagcgggcgggacggcccttctcctccgggctgtaattagcgcttggtttaatgacggctcgtttcttttctgtggctgcgtgaaagccttaaagggctccgggagggccctttgtgcgggggggagcggctcggggggtgcgtgcgtgtgtgtgtgcgtggggagcgccgcgtgcggcccgcgctgcccggcggctgtgagcgctgcgggcgcggcgcggggctttgtgcgctccgcgtgtgcgcgaggggagcgcggccgggggcggtgccccgcggtgcgggggggctgcgaggggaacaaaggctgcgtgcggggtgtgtgcgtgggggggtgagcagggggtgtgggcgcggcggtcgggctgtaacccccccctgcacccccctccccgagttgctgagcacggcccggcttcgggtgcggggctccgtgcggggcgtggcgcggggctcgccgtgccgggcggggggtggcggcaggtgggggtgccgggcggggcggggccgcctcgggccggggagggctcgggggaggggcgcggcggcccccggagcgccggcggtgtccccagagagcccgcaccagtgccatctgcttggccgatttctcgaagtgcttctgccggcttgtgtctctccgctctgagctgtgaggagctttcgggatatgggaaaagcaggacccgcagctgcgtccgcctcccctgcattctagagcctctgctaaccatgttcatgccttcttctttttcctacagctcctgggcaacgtgctggttattgtgaccggtcgctagccaccatggtgagcaagggcgaggagctgttcaccggggtggtgcccatcctggtcgagctggacggcgacgtaaacggccacaagttcagcgtgtccggcgagggcgagggcgatgccacctacggcaagctgaccctgaagttcatctgcaccaccggcaagctgcccgtgccctggcccaccctcgtgaccaccctgacctacggcgtgcagtgcttcagccgctaccccgaccacatgaagcagcacgacttcttcaagtccgccatgcccgaaggctacgtccaggagcgcaccatcttcttcaaggacgacggcaactacaagacccgcgccgaggtgaagttcgagggcgacaccctggtgaaccgcatcgagctgaagggcatcgacttcaaggaggacggcaacatcctggggcacaagctggagtacaactacaacagccacaacgtctatatcatggccgacaagcagaagaacggcatcaaggtgaacttcaagatccgccacaacatcgaggacggcagcgtgcagctcgccgaccactaccagcagaacacccccatcggcgacggccccgtgctgctgcccgacaaccactacctgagcacccagtccgccctgagcaaagaccccaacgagaagcgcgatcacatggtcctgctggagttcgtgaccgccgccgggatcactctcggcatggacgagctgtacaagtaacctgcaggcgccggcggtgtccccagagagcccgcaccagtgccatctgcttggccgatatactgtcatagtagtaccagcttgtgtctctccgctctgagctgtcactgcttgacggtaaatgggaaaagcaggacccgcagctgcgtccgcctcccctgcatgagctcgctgatcagcctcgactgtgccttctagttgccagccatctgttgtttgcccctcccccgtgccttccttgaccctggaaggtgccactcccactgtcctttcctaataaaatgaggaaattgcatcgcattgtctgagtaggtgtcattctattctggggggtggggtggggcaggacagcaagggggaggattgggaagacaatagcaggcatgctggggatgcggtgggctctatggaagcttgaattcagctgacgtgcctcggaccgctaggaacccctagtgatggagttggccactccctctctgcgcgctcgctcgctcactgaggccgggcgaccaaaggtcgcccgacgcccgggctttgcccgggcggcctcagtgagcgagcgagcgcgcag

SEQ ID NO: 193 - DNA, 2940 bp, synthetic construct
  misc_feature 1..2940: note = Description of Artificial Sequence: Syntheticpolynucleotide
  source 1..2940: mol_type = other DNA
ctgcgcgctcgctcgctcactgaggccgcccgggcgtcgggcgacctttggtcgcccggcctcagtgagcgagcgagcgcgcagagagggagtggccaactccatcactaggggttcctgcggccgcacgcgtgacattgattattgactagttattaatagtaatcaattacggggtcattagttcatagcccatatatggagttccgcgttacataacttacggtaaatggcccgcctggctgaccgcccaacgacccccgcccattgacgtcaataatgacgtatgttcccatagtaacgccaatagggactttccattgacgtcaatgggtggactatttacggtaaactgcccacttggcagtacatcaagtgtatcatatgccaagtacgccccctattgacgtcaatgacggtaaatggcccgcctggcattatgcccagtacatgaccttatgggactttcctacttggcagtacatctacgtattagtcatcgctattaccatgggtcgaggtgagccccacgttctgcttcactctccccatctcccccccctccccacccccaattttgtatttatttattttttaattattttgtgcagcgatgggggcggggggggggggggcgcgcgccaggcggggcggggcggggcgaggggcggggcggggcgaggcggagaggtgcggcggcagccaatcagagcggcgcgctccgaaagtttccttttatggcgaggcggcggcggcggcggccctataaaaagcgaagcgcgcggcgggcgggagtcgctgcgttgccttcgccccgtgccccgctccgcgccgcctcgcgccgcccgccccggctctgactgaccgcgttactcccacaggtgagcgggcgggacggcccttctcctccgggctgtaattagcgcttggtttaatgacggctcgtttcttttctgtggctgcgtgaaagccttaaagggctccgggagggccctttgtgcgggggggagcggctcggggggtgcgtgcgtgtgtgtgtgcgtggggagcgccgcgtgcggcccgcgctgcccggcggctgtgagcgctgcgggcgcggcgcggggctttgtgcgctccgcgtgtgcgcgaggggagcgcggccgggggcggtgccccgcggtgcgggggggctgcgaggggaacaaaggctgcgtgcggggtgtgtgcgtgggggggtgagcagggggtgtgggcgcggcggtcgggctgtaacccccccctgcacccccctccccgagttgctgagcacggcccggcttcgggtgcggggctccgtgcggggcgtggcgcggggctcgccgtgccgggcggggggtggcggcaggtgggggtgccgggcggggcggggccgcctcgggccggggagggctcgggggaggggcgcggcggcccccggagcgccggcgcatagctcttatgatagcaatgtcagcagtgcctttctccaccttgaccacgcgtgttaagattctaaaattatctcgtgtggtaagtggtggagagaagtaaggttgaccatactctacagttgtgtctagagcctctgctaaccatgttcatgccttcttctttttcctacagctcctgggcaacgtgctggttattgtgaccggtcgctagccaccatggtgagcaagggcgaggagctgttcaccggggtggtgcccatcctggtcgagctggacggcgacgtaaacggccacaagttcagcgtgtccggcgagggcgagggcgatgccacctacggcaagctgaccctgaagttcatctgcaccaccggcaagctgcccgtgccctggcccaccctcgtgaccaccctgacctacggcgtgcagtgcttcagccgctaccccgaccacatgaagcagcacgacttcttcaagtccgccatgcccgaaggctacgtccaggagcgcaccatcttcttcaaggacgacggcaactacaagacccgcgccgaggtgaagttcgagggcgacaccctggtgaaccgcatcgagctgaagggcatcgacttcaaggaggacggcaacatcctggggcacaagctggagtacaactacaacagccacaacgtctatatcatggccgacaagcagaagaacggcatcaaggtgaacttcaagatccgccacaacatcgaggacggcagcgtgcagctcgccgaccactaccagcagaacacccccatcggcgacggccccgtgctgctgcccgacaaccactacctgagcacccagtccgccctgagcaaagaccccaacgagaagcgcgatcacatggtcctgctggagttcgtgaccgccgccgggatcactctcggcatggacgagctgtacaagtaacctgcaggcgccggcgcatagctcttatgatagcaatgtcagcagtgcctttctccaccttgaccacgcgtgttaagattctaaaattatctcgtgtggtaagtggtggagagaagtaaggttgaccatactctacagttgtggagctcgctgatcagcctcgactgtgccttctagttgccagccatctgttgtttgcccctcccccgtgccttccttgaccctggaaggtgccactcccactgtcctttcctaataaaatgaggaaattgcatcgcattgtctgagtaggtgtcattctattctggggggtggggtggggcaggacagcaagggggaggattgggaagacaatagcaggcatgctggggatgcggtgggctctatggaagcttgaattcagctgacgtgcctcggaccgctaggaacccctagtgatggagttggccactccctctctgcgcgctcgctcgctcactgaggccgggcgaccaaaggtcgcccgacgcccgggctttgcccgggcggcctcagtgagcgagcgagcgcgcag

SEQ ID NO: 194 - DNA, 2978 bp, synthetic construct
  misc_feature 1..2978: note = Description of Artificial Sequence: Syntheticpolynucleotide
  source 1..2978: mol_type = other DNA
ctgcgcgctcgctcgctcactgaggccgcccgggcgtcgggcgacctttggtcgcccggcctcagtgagcgagcgagcgcgcagagagggagtggccaactccatcactaggggttcctgcggccgcacgcgtgacattgattattgactagttattaatagtaatcaattacggggtcattagttcatagcccatatatggagttccgcgttacataacttacggtaaatggcccgcctggctgaccgcccaacgacccccgcccattgacgtcaataatgacgtatgttcccatagtaacgccaatagggactttccattgacgtcaatgggtggactatttacggtaaactgcccacttggcagtacatcaagtgtatcatatgccaagtacgccccctattgacgtcaatgacggtaaatggcccgcctggcattatgcccagtacatgaccttatgggactttcctacttggcagtacatctacgtattagtcatcgctattaccatgggtcgaggtgagccccacgttctgcttcactctccccatctcccccccctccccacccccaattttgtatttatttattttttaattattttgtgcagcgatgggggcggggggggggggggcgcgcgccaggcggggcggggcggggcgaggggcggggcggggcgaggcggagaggtgcggcggcagccaatcagagcggcgcgctccgaaagtttccttttatggcgaggcggcggcggcggcggccctataaaaagcgaagcgcgcggcgggcgggagtcgctgcgttgccttcgccccgtgccccgctccgcgccgcctcgcgccgcccgccccggctctgactgaccgcgttactcccacaggtgagcgggcgggacggcccttctcctccgggctgtaattagcgcttggtttaatgacggctcgtttcttttctgtggctgcgtgaaagccttaaagggctccgggagggccctttgtgcgggggggagcggctcggggggtgcgtgcgtgtgtgtgtgcgtggggagcgccgcgtgcggcccgcgctgcccggcggctgtgagcgctgcgggcgcggcgcggggctttgtgcgctccgcgtgtgcgcgaggggagcgcggccgggggcggtgccccgcggtgcgggggggctgcgaggggaacaaaggctgcgtgcggggtgtgtgcgtgggggggtgagcagggggtgtgggcgcggcggtcgggctgtaacccccccctgcacccccctccccgagttgctgagcacggcccggcttcgggtgcggggctccgtgcggggcgtggcgcggggctcgccgtgccgggcggggggtggcggcaggtgggggtgccgggcggggcggggccgcctcgggccggggagggctcgggggaggggcgcggcggcccccggagcgccggcggagcaggaggaccaaggccctggcgaaggccgtggcctcgttctccaccttgaccacgcgttgtgcaggtcccaatgggcgtgtggtagaggtggagcacggggacgcgggcctggacgccggcatccgggctcaggacccccctctctagagcctctgctaaccatgttcatgccttcttctttttcctacagctcctgggcaacgtgctggttattgtgaccggtcgctagccaccatggtgagcaagggcgaggagctgttcaccggggtggtgcccatcctggtcgagctggacggcgacgtaaacggccacaagttcagcgtgtccggcgagggcgagggcgatgccacctacggcaagctgaccctgaagttcatctgcaccaccggcaagctgcccgtgccctggcccaccctcgtgaccaccctgacctacggcgtgcagtgcttcagccgctaccccgaccacatgaagcagcacgacttcttcaagtccgccatgcccgaaggctacgtccaggagcgcaccatcttcttcaaggacgacggcaactacaagacccgcgccgaggtgaagttcgagggcgacaccctggtgaaccgcatcgagctgaagggcatcgacttcaaggaggacggcaacatcctggggcacaagctggagtacaactacaacagccacaacgtctatatcatggccgacaagcagaagaacggcatcaaggtgaacttcaagatccgccacaacatcgaggacggcagcgtgcagctcgccgaccactaccagcagaacacccccatcggcgacggccccgtgctgctgcccgacaaccactacctgagcacccagtccgccctgagcaaagaccccaacgagaagcgcgatcacatggtcctgctggagttcgtgaccgccgccgggatcactctcggcatggacgagctgtacaagtaacctgcaggcgccggcggagcaggaggaccaaggccctggcgaaggccgtggcctcgttctccaccttgaccacgcgttgtgcaggtcccaatgggcgtgtggtagaggtggagcacggggacgcgggcctggacgccggcatccgggctcaggacccccctcgagctcgctgatcagcctcgactgtgccttctagttgccagccatctgttgtttgcccctcccccgtgccttccttgaccctggaaggtgccactcccactgtcctttcctaataaaatgaggaaattgcatcgcattgtctgagtaggtgtcattctattctggggggtggggtggggcaggacagcaagggggaggattgggaagacaatagcaggcatgctggggatgcggtgggctctatggaagcttgaattcagctgacgtgcctcggaccgctaggaacccctagtgatggagttggccactccctctctgcgcgctcgctcgctcactgaggccgggcgaccaaaggtcgcccgacgcccgggctttgcccgggcggcctcagtgagcgagcgagcgcgcag

SEQ ID NO: 195 - DNA, 2982 bp, synthetic construct
  misc_feature 1..2982: note = Description of Artificial Sequence: Syntheticpolynucleotide
  source 1..2982: mol_type = other DNA
ctgcgcgctcgctcgctcactgaggccgcccgggcgtcgggcgacctttggtcgcccggcctcagtgagcgagcgagcgcgcagagagggagtggccaactccatcactaggggttcctgcggccgcacgcgtgacattgattattgactagttattaatagtaatcaattacggggtcattagttcatagcccatatatggagttccgcgttacataacttacggtaaatggcccgcctggctgaccgcccaacgacccccgcccattgacgtcaataatgacgtatgttcccatagtaacgccaatagggactttccattgacgtcaatgggtggactatttacggtaaactgcccacttggcagtacatcaagtgtatcatatgccaagtacgccccctattgacgtcaatgacggtaaatggcccgcctggcattatgcccagtacatgaccttatgggactttcctacttggcagtacatctacgtattagtcatcgctattaccatgggtcgaggtgagccccacgttctgcttcactctccccatctcccccccctccccacccccaattttgtatttatttattttttaattattttgtgcagcgatgggggcggggggggggggggcgcgcgccaggcggggcggggcggggcgaggggcggggcggggcgaggcggagaggtgcggcggcagccaatcagagcggcgcgctccgaaagtttccttttatggcgaggcggcggcggcggcggccctataaaaagcgaagcgcgcggcgggcgggagtcgctgcgttgccttcgccccgtgccccgctccgcgccgcctcgcgccgcccgccccggctctgactgaccgcgttactcccacaggtgagcgggcgggacggcccttctcctccgggctgtaattagcgcttggtttaatgacggctcgtttcttttctgtggctgcgtgaaagccttaaagggctccgggagggccctttgtgcgggggggagcggctcggggggtgcgtgcgtgtgtgtgtgcgtggggagcgccgcgtgcggcccgcgctgcccggcggctgtgagcgctgcgggcgcggcgcggggctttgtgcgctccgcgtgtgcgcgaggggagcgcggccgggggcggtgccccgcggtgcgggggggctgcgaggggaacaaaggctgcgtgcggggtgtgtgcgtgggggggtgagcagggggtgtgggcgcggcggtcgggctgtaacccccccctgcacccccctccccgagttgctgagcacggcccggcttcgggtgcggggctccgtgcggggcgtggcgcggggctcgccgtgccgggcggggggtggcggcaggtgggggtgccgggcggggcggggccgcctcgggccggggagggctcgggggaggggcgcggcggcccccggagcgccggcggtgtccccagagagcccgcaccagtgccatctgcttggccgatttctccaccttgaccacgcgtcttgtgtctctccgctctgaggtgactggttgggtggagatatgggaaaagcaggacccgcagctgcgtccgcctcccctgcattctagagcctctgctaaccatgttcatgccttcttctttttcctacagctcctgggcaacgtgctggttattgtgaccggtcgctagccaccatggtgagcaagggcgaggagctgttcaccggggtggtgcccatcctggtcgagctggacggcgacgtaaacggccacaagttcagcgtgtccggcgagggcgagggcgatgccacctacggcaagctgaccctgaagttcatctgcaccaccggcaagctgcccgtgccctggcccaccctcgtgaccaccctgacctacggcgtgcagtgcttcagccgctaccccgaccacatgaagcagcacgacttcttcaagtccgccatgcccgaaggctacgtccaggagcgcaccatcttcttcaaggacgacggcaactacaagacccgcgccgaggtgaagttcgagggcgacaccctggtgaaccgcatcgagctgaagggcatcgacttcaaggaggacggcaacatcctggggcacaagctggagtacaactacaacagccacaacgtctatatcatggccgacaagcagaagaacggcatcaaggtgaacttcaagatccgccacaacatcgaggacggcagcgtgcagctcgccgaccactaccagcagaacacccccatcggcgacggccccgtgctgctgcccgacaaccactacctgagcacccagtccgccctgagcaaagaccccaacgagaagcgcgatcacatggtcctgctggagttcgtgaccgccgccgggatcactctcggcatggacgagctgtacaagtaacctgcaggcgccggcggtgtccccagagagcccgcaccagtgccatctgcttggccgatttctccaccttgaccacgcgtcttgtgtctctccgctctgaggtgactggttgggtggagatatgggaaaagcaggacccgcagctgcgtccgcctcccctgcatgagctcgctgatcagcctcgactgtgccttctagttgccagccatctgttgtttgcccctcccccgtgccttccttgaccctggaaggtgccactcccactgtcctttcctaataaaatgaggaaattgcatcgcattgtctgagtaggtgtcattctattctggggggtggggtggggcaggacagcaagggggaggattgggaagacaatagcaggcatgctggggatgcggtgggctctatggaagcttgaattcagctgacgtgcctcggaccgctaggaacccctagtgatggagttggccactccctctctgcgcgctcgctcgctcactgaggccgggcgaccaaaggtcgcccgacgcccgggctttgcccgggcggcctcagtgagcgagcgagcgcgcag

SEQ ID NO: 196 - DNA, 2940 bp, synthetic construct
  misc_feature 1..2940: note = Description of Artificial Sequence: Syntheticpolynucleotide
  source 1..2940: mol_type = other DNA
ctgcgcgctcgctcgctcactgaggccgcccgggcgtcgggcgacctttggtcgcccggcctcagtgagcgagcgagcgcgcagagagggagtggccaactccatcactaggggttcctgcggccgcacgcgtgacattgattattgactagttattaatagtaatcaattacggggtcattagttcatagcccatatatggagttccgcgttacataacttacggtaaatggcccgcctggctgaccgcccaacgacccccgcccattgacgtcaataatgacgtatgttcccatagtaacgccaatagggactttccattgacgtcaatgggtggactatttacggtaaactgcccacttggcagtacatcaagtgtatcatatgccaagtacgccccctattgacgtcaatgacggtaaatggcccgcctggcattatgcccagtacatgaccttatgggactttcctacttggcagtacatctacgtattagtcatcgctattaccatgggtcgaggtgagccccacgttctgcttcactctccccatctcccccccctccccacccccaattttgtatttatttattttttaattattttgtgcagcgatgggggcggggggggggggggcgcgcgccaggcggggcggggcggggcgaggggcggggcggggcgaggcggagaggtgcggcggcagccaatcagagcggcgcgctccgaaagtttccttttatggcgaggcggcggcggcggcggccctataaaaagcgaagcgcgcggcgggcgggagtcgctgcgttgccttcgccccgtgccccgctccgcgccgcctcgcgccgcccgccccggctctgactgaccgcgttactcccacaggtgagcgggcgggacggcccttctcctccgggctgtaattagcgcttggtttaatgacggctcgtttcttttctgtggctgcgtgaaagccttaaagggctccgggagggccctttgtgcgggggggagcggctcggggggtgcgtgcgtgtgtgtgtgcgtggggagcgccgcgtgcggcccgcgctgcccggcggctgtgagcgctgcgggcgcggcgcggggctttgtgcgctccgcgtgtgcgcgaggggagcgcggccgggggcggtgccccgcggtgcgggggggctgcgaggggaacaaaggctgcgtgcggggtgtgtgcgtgggggggtgagcagggggtgtgggcgcggcggtcgggctgtaacccccccctgcacccccctccccgagttgctgagcacggcccggcttcgggtgcggggctccgtgcggggcgtggcgcggggctcgccgtgccgggcggggggtggcggcaggtgggggtgccgggcggggcggggccgcctcgggccggggagggctcgggggaggggcgcggcggcccccggagcgccggcgcatagctcttatgatagcaatgtcagcagtgcctttctccaccttgaccacgcgtgttaagattctaaaattatctcgtgtggtaagtggtggagagaagtaaggttgaccatactctacagttgtgtctagagcctctgctaaccatgttcatgccttcttctttttcctacagctcctgggcaacgtgctggttattgtgaccggtcgctagccaccatggtgagcaagggcgaggagctgttcaccggggtggtgcccatcctggtcgagctggacggcgacgtaaacggccacaagttcagcgtgtccggcgagggcgagggcgatgccacctacggcaagctgaccctgaagttcatctgcaccaccggcaagctgcccgtgccctggcccaccctcgtgaccaccctgacctacggcgtgcagtgcttcagccgctaccccgaccacatgaagcagcacgacttcttcaagtccgccatgcccgaaggctacgtccaggagcgcaccatcttcttcaaggacgacggcaactacaagacccgcgccgaggtgaagttcgagggcgacaccctggtgaaccgcatcgagctgaagggcatcgacttcaaggaggacggcaacatcctggggcacaagctggagtacaactacaacagccacaacgtctatatcatggccgacaagcagaagaacggcatcaaggtgaacttcaagatccgccacaacatcgaggacggcagcgtgcagctcgccgaccactaccagcagaacacccccatcggcgacggccccgtgctgctgcccgacaaccactacctgagcacccagtccgccctgagcaaagaccccaacgagaagcgcgatcacatggtcctgctggagttcgtgaccgccgccgggatcactctcggcatggacgagctgtacaagtaacctgcaggcgccggcgcatagctcttatgatagcaatgtcagcagtgcctatactgtcatagtagtaccaggttaagattctaaaattatcatggtactaatgttggcagtgtaagtaaggttgaccatactctacagttgtggagctcgctgatcagcctcgactgtgccttctagttgccagccatctgttgtttgcccctcccccgtgccttccttgaccctggaaggtgccactcccactgtcctttcctaataaaatgaggaaattgcatcgcattgtctgagtaggtgtcattctattctggggggtggggtggggcaggacagcaagggggaggattgggaagacaatagcaggcatgctggggatgcggtgggctctatggaagcttgaattcagctgacgtgcctcggaccgctaggaacccctagtgatggagttggccactccctctctgcgcgctcgctcgctcactgaggccgggcgaccaaaggtcgcccgacgcccgggctttgcccgggcggcctcagtgagcgagcgagcgcgcag

SEQ ID NO: 197 - DNA, 2978 bp, synthetic construct
  misc_feature 1..2978: note = Description of Artificial Sequence: Syntheticpolynucleotide
  source 1..2978: mol_type = other DNA
ctgcgcgctcgctcgctcactgaggccgcccgggcgtcgggcgacctttggtcgcccggcctcagtgagcgagcgagcgcgcagagagggagtggccaactccatcactaggggttcctgcggccgcacgcgtgacattgattattgactagttattaatagtaatcaattacggggtcattagttcatagcccatatatggagttccgcgttacataacttacggtaaatggcccgcctggctgaccgcccaacgacccccgcccattgacgtcaataatgacgtatgttcccatagtaacgccaatagggactttccattgacgtcaatgggtggactatttacggtaaactgcccacttggcagtacatcaagtgtatcatatgccaagtacgccccctattgacgtcaatgacggtaaatggcccgcctggcattatgcccagtacatgaccttatgggactttcctacttggcagtacatctacgtattagtcatcgctattaccatgggtcgaggtgagccccacgttctgcttcactctccccatctcccccccctccccacccccaattttgtatttatttattttttaattattttgtgcagcgatgggggcggggggggggggggcgcgcgccaggcggggcggggcggggcgaggggcggggcggggcgaggcggagaggtgcggcggcagccaatcagagcggcgcgctccgaaagtttccttttatggcgaggcggcggcggcggcggccctataaaaagcgaagcgcgcggcgggcgggagtcgctgcgttgccttcgccccgtgccccgctccgcgccgcctcgcgccgcccgccccggctctgactgaccgcgttactcccacaggtgagcgggcgggacggcccttctcctccgggctgtaattagcgcttggtttaatgacggctcgtttcttttctgtggctgcgtgaaagccttaaagggctccgggagggccctttgtgcgggggggagcggctcggggggtgcgtgcgtgtgtgtgtgcgtggggagcgccgcgtgcggcccgcgctgcccggcggctgtgagcgctgcgggcgcggcgcggggctttgtgcgctccgcgtgtgcgcgaggggagcgcggccgggggcggtgccccgcggtgcgggggggctgcgaggggaacaaaggctgcgtgcggggtgtgtgcgtgggggggtgagcagggggtgtgggcgcggcggtcgggctgtaacccccccctgcacccccctccccgagttgctgagcacggcccggcttcgggtgcggggctccgtgcggggcgtggcgcggggctcgccgtgccgggcggggggtggcggcaggtgggggtgccgggcggggcggggccgcctcgggccggggagggctcgggggaggggcgcggcggcccccggagcgccggcggagcaggaggaccaaggccctggcgaaggccgtggcctcgttctccaccttgaccacgcgttgtgcaggtcccaatgggcgtgtggtagaggtggagcacggggacgcgggcctggacgccggcatccgggctcaggacccccctctctagagcctctgctaaccatgttcatgccttcttctttttcctacagctcctgggcaacgtgctggttattgtgaccggtcgctagccaccatggtgagcaagggcgaggagctgttcaccggggtggtgcccatcctggtcgagctggacggcgacgtaaacggccacaagttcagcgtgtccggcgagggcgagggcgatgccacctacggcaagctgaccctgaagttcatctgcaccaccggcaagctgcccgtgccctggcccaccctcgtgaccaccctgacctacggcgtgcagtgcttcagccgctaccccgaccacatgaagcagcacgacttcttcaagtccgccatgcccgaaggctacgtccaggagcgcaccatcttcttcaaggacgacggcaactacaagacccgcgccgaggtgaagttcgagggcgacaccctggtgaaccgcatcgagctgaagggcatcgacttcaaggaggacggcaacatcctggggcacaagctggagtacaactacaacagccacaacgtctatatcatggccgacaagcagaagaacggcatcaaggtgaacttcaagatccgccacaacatcgaggacggcagcgtgcagctcgccgaccactaccagcagaacacccccatcggcgacggccccgtgctgctgcccgacaaccactacctgagcacccagtccgccctgagcaaagaccccaacgagaagcgcgatcacatggtcctgctggagttcgtgaccgccgccgggatcactctcggcatggacgagctgtacaagtaacctgcaggcgccggcggagcaggaggaccaaggccctggcgaaggccgtggcctcgatactgtcatagtagtaccagtgtgcaggtcccaatggctggtactaatgtgacagtctcggggacgcgggcctggacgccggcatccgggctcaggacccccctcgagctcgctgatcagcctcgactgtgccttctagttgccagccatctgttgtttgcccctcccccgtgccttccttgaccctggaaggtgccactcccactgtcctttcctaataaaatgaggaaattgcatcgcattgtctgagtaggtgtcattctattctggggggtggggtggggcaggacagcaagggggaggattgggaagacaatagcaggcatgctggggatgcggtgggctctatggaagcttgaattcagctgacgtgcctcggaccgctaggaacccctagtgatggagttggccactccctctctgcgcgctcgctcgctcactgaggccgggcgaccaaaggtcgcccgacgcccgggctttgcccgggcggcctcagtgagcgagcgagcgcgcag

SEQ ID NO: 198 - DNA, 2982 bp, synthetic construct
  misc_feature 1..2982: note = Description of Artificial Sequence: Syntheticpolynucleotide
  source 1..2982: mol_type = other DNA
ctgcgcgctcgctcgctcactgaggccgcccgggcgtcgggcgacctttggtcgcccggcctcagtgagcgagcgagcgcgcagagagggagtggccaactccatcactaggggttcctgcggccgcacgcgtgacattgattattgactagttattaatagtaatcaattacggggtcattagttcatagcccatatatggagttccgcgttacataacttacggtaaatggcccgcctggctgaccgcccaacgacccccgcccattgacgtcaataatgacgtatgttcccatagtaacgccaatagggactttccattgacgtcaatgggtggactatttacggtaaactgcccacttggcagtacatcaagtgtatcatatgccaagtacgccccctattgacgtcaatgacggtaaatggcccgcctggcattatgcccagtacatgaccttatgggactttcctacttggcagtacatctacgtattagtcatcgctattaccatgggtcgaggtgagccccacgttctgcttcactctccccatctcccccccctccccacccccaattttgtatttatttattttttaattattttgtgcagcgatgggggcggggggggggggggcgcgcgccaggcggggcggggcggggcgaggggcggggcggggcgaggcggagaggtgcggcggcagccaatcagagcggcgcgctccgaaagtttccttttatggcgaggcggcggcggcggcggccctataaaaagcgaagcgcgcggcgggcgggagtcgctgcgttgccttcgccccgtgccccgctccgcgccgcctcgcgccgcccgccccggctctgactgaccgcgttactcccacaggtgagcgggcgggacggcccttctcctccgggctgtaattagcgcttggtttaatgacggctcgtttcttttctgtggctgcgtgaaagccttaaagggctccgggagggccctttgtgcgggggggagcggctcggggggtgcgtgcgtgtgtgtgtgcgtggggagcgccgcgtgcggcccgcgctgcccggcggctgtgagcgctgcgggcgcggcgcggggctttgtgcgctccgcgtgtgcgcgaggggagcgcggccgggggcggtgccccgcggtgcgggggggctgcgaggggaacaaaggctgcgtgcggggtgtgtgcgtgggggggtgagcagggggtgtgggcgcggcggtcgggctgtaacccccccctgcacccccctccccgagttgctgagcacggcccggcttcgggtgcggggctccgtgcggggcgtggcgcggggctcgccgtgccgggcggggggtggcggcaggtgggggtgccgggcggggcggggccgcctcgggccggggagggctcgggggaggggcgcggcggcccccggagcgccggcggtgtccccagagagcccgcaccagtgccatctgcttggccgatttctccaccttgaccacgcgtcttgtgtctctccgctctgaggtgactggttgggtggagatatgggaaaagcaggacccgcagctgcgtccgcctcccctgcattctagagcctctgctaaccatgttcatgccttcttctttttcctacagctcctgggcaacgtgctggttattgtgaccggtcgctagccaccatggtgagcaagggcgaggagctgttcaccggggtggtgcccatcctggtcgagctggacggcgacgtaaacggccacaagttcagcgtgtccggcgagggcgagggcgatgccacctacggcaagctgaccctgaagttcatctgcaccaccggcaagctgcccgtgccctggcccaccctcgtgaccaccctgacctacggcgtgcagtgcttcagccgctaccccgaccacatgaagcagcacgacttcttcaagtccgccatgcccgaaggctacgtccaggagcgcaccatcttcttcaaggacgacggcaactacaagacccgcgccgaggtgaagttcgagggcgacaccctggtgaaccgcatcgagctgaagggcatcgacttcaaggaggacggcaacatcctggggcacaagctggagtacaactacaacagccacaacgtctatatcatggccgacaagcagaagaacggcatcaaggtgaacttcaagatccgccacaacatcgaggacggcagcgtgcagctcgccgaccactaccagcagaacacccccatcggcgacggccccgtgctgctgcccgacaaccactacctgagcacccagtccgccctgagcaaagaccccaacgagaagcgcgatcacatggtcctgctggagttcgtgaccgccgccgggatcactctcggcatggacgagctgtacaagtaacctgcaggcgccggcggtgtccccagagagcccgcaccagtgccatctgcttggccgatatactgtcatagtagtaccagcttgtgtctctccgctctgagctgtcactgcttgacggtaaatgggaaaagcaggacccgcagctgcgtccgcctcccctgcatgagctcgctgatcagcctcgactgtgccttctagttgccagccatctgttgtttgcccctcccccgtgccttccttgaccctggaaggtgccactcccactgtcctttcctaataaaatgaggaaattgcatcgcattgtctgagtaggtgtcattctattctggggggtggggtggggcaggacagcaagggggaggattgggaagacaatagcaggcatgctggggatgcggtgggctctatggaagcttgaattcagctgacgtgcctcggaccgctaggaacccctagtgatggagttggccactccctctctgcgcgctcgctcgctcactgaggccgggcgaccaaaggtcgcccgacgcccgggctttgcccgggcggcctcagtgagcgagcgagcgcgcag

SEQ ID NO: 199 - DNA, 2940 bp, synthetic construct
  misc_feature 1..2940: note = Description of Artificial Sequence: Syntheticpolynucleotide
  source 1..2940: mol_type = other DNA
ctgcgcgctcgctcgctcactgaggccgcccgggcgtcgggcgacctttggtcgcccggcctcagtgagcgagcgagcgcgcagagagggagtggccaactccatcactaggggttcctgcggccgcacgcgtgacattgattattgactagttattaatagtaatcaattacggggtcattagttcatagcccatatatggagttccgcgttacataacttacggtaaatggcccgcctggctgaccgcccaacgacccccgcccattgacgtcaataatgacgtatgttcccatagtaacgccaatagggactttccattgacgtcaatgggtggactatttacggtaaactgcccacttggcagtacatcaagtgtatcatatgccaagtacgccccctattgacgtcaatgacggtaaatggcccgcctggcattatgcccagtacatgaccttatgggactttcctacttggcagtacatctacgtattagtcatcgctattaccatgggtcgaggtgagccccacgttctgcttcactctccccatctcccccccctccccacccccaattttgtatttatttattttttaattattttgtgcagcgatgggggcggggggggggggggcgcgcgccaggcggggcggggcggggcgaggggcggggcggggcgaggcggagaggtgcggcggcagccaatcagagcggcgcgctccgaaagtttccttttatggcgaggcggcggcggcggcggccctataaaaagcgaagcgcgcggcgggcgggagtcgctgcgttgccttcgccccgtgccccgctccgcgccgcctcgcgccgcccgccccggctctgactgaccgcgttactcccacaggtgagcgggcgggacggcccttctcctccgggctgtaattagcgcttggtttaatgacggctcgtttcttttctgtggctgcgtgaaagccttaaagggctccgggagggccctttgtgcgggggggagcggctcggggggtgcgtgcgtgtgtgtgtgcgtggggagcgccgcgtgcggcccgcgctgcccggcggctgtgagcgctgcgggcgcggcgcggggctttgtgcgctccgcgtgtgcgcgaggggagcgcggccgggggcggtgccccgcggtgcgggggggctgcgaggggaacaaaggctgcgtgcggggtgtgtgcgtgggggggtgagcagggggtgtgggcgcggcggtcgggctgtaacccccccctgcacccccctccccgagttgctgagcacggcccggcttcgggtgcggggctccgtgcggggcgtggcgcggggctcgccgtgccgggcggggggtggcggcaggtgggggtgccgggcggggcggggccgcctcgggccggggagggctcgggggaggggcgcggcggcccccggagcgccggcgcatagctcttatgatagcaatgtcagcagtgcctatactgtcatagtagtaccaggttaagattctaaaattatcatggtactaatgttggcagtgtaagtaaggttgaccatactctacagttgtgtctagagcctctgctaaccatgttcatgccttcttctttttcctacagctcctgggcaacgtgctggttattgtgaccggtcgctagccaccatggtgagcaagggcgaggagctgttcaccggggtggtgcccatcctggtcgagctggacggcgacgtaaacggccacaagttcagcgtgtccggcgagggcgagggcgatgccacctacggcaagctgaccctgaagttcatctgcaccaccggcaagctgcccgtgccctggcccaccctcgtgaccaccctgacctacggcgtgcagtgcttcagccgctaccccgaccacatgaagcagcacgacttcttcaagtccgccatgcccgaaggctacgtccaggagcgcaccatcttcttcaaggacgacggcaactacaagacccgcgccgaggtgaagttcgagggcgacaccctggtgaaccgcatcgagctgaagggcatcgacttcaaggaggacggcaacatcctggggcacaagctggagtacaactacaacagccacaacgtctatatcatggccgacaagcagaagaacggcatcaaggtgaacttcaagatccgccacaacatcgaggacggcagcgtgcagctcgccgaccactaccagcagaacacccccatcggcgacggccccgtgctgctgcccgacaaccactacctgagcacccagtccgccctgagcaaagaccccaacgagaagcgcgatcacatggtcctgctggagttcgtgaccgccgccgggatcactctcggcatggacgagctgtacaagtaacctgcaggcgccggcgcatagctcttatgatagcaatgtcagcagtgcctatactgtcatagtagtaccaggttaagattctaaaattatcatggtactaatgttggcagtgtaagtaaggttgaccatactctacagttgtggagctcgctgatcagcctcgactgtgccttctagttgccagccatctgttgtttgcccctcccccgtgccttccttgaccctggaaggtgccactcccactgtcctttcctaataaaatgaggaaattgcatcgcattgtctgagtaggtgtcattctattctggggggtggggtggggcaggacagcaagggggaggattgggaagacaatagcaggcatgctggggatgcggtgggctctatggaagcttgaattcagctgacgtgcctcggaccgctaggaacccctagtgatggagttggccactccctctctgcgcgctcgctcgctcactgaggccgggcgaccaaaggtcgcccgacgcccgggctttgcccgggcggcctcagtgagcgagcgagcgcgcag

SEQ ID NO: 200 - DNA, 2978 bp, synthetic construct
  misc_feature 1..2978: note = Description of Artificial Sequence: Syntheticpolynucleotide
  source 1..2978: mol_type = other DNA
ctgcgcgctcgctcgctcactgaggccgcccgggcgtcgggcgacctttggtcgcccggcctcagtgagcgagcgagcgcgcagagagggagtggccaactccatcactaggggttcctgcggccgcacgcgtgacattgattattgactagttattaatagtaatcaattacggggtcattagttcatagcccatatatggagttccgcgttacataacttacggtaaatggcccgcctggctgaccgcccaacgacccccgcccattgacgtcaataatgacgtatgttcccatagtaacgccaatagggactttccattgacgtcaatgggtggactatttacggtaaactgcccacttggcagtacatcaagtgtatcatatgccaagtacgccccctattgacgtcaatgacggtaaatggcccgcctggcattatgcccagtacatgaccttatgggactttcctacttggcagtacatctacgtattagtcatcgctattaccatgggtcgaggtgagccccacgttctgcttcactctccccatctcccccccctccccacccccaattttgtatttatttattttttaattattttgtgcagcgatgggggcggggggggggggggcgcgcgccaggcggggcggggcggggcgaggggcggggcggggcgaggcggagaggtgcggcggcagccaatcagagcggcgcgctccgaaagtttccttttatggcgaggcggcggcggcggcggccctataaaaagcgaagcgcgcggcgggcgggagtcgctgcgttgccttcgccccgtgccccgctccgcgccgcctcgcgccgcccgccccggctctgactgaccgcgttactcccacaggtgagcgggcgggacggcccttctcctccgggctgtaattagcgcttggtttaatgacggctcgtttcttttctgtggctgcgtgaaagccttaaagggctccgggagggccctttgtgcgggggggagcggctcggggggtgcgtgcgtgtgtgtgtgcgtggggagcgccgcgtgcggcccgcgctgcccggcggctgtgagcgctgcgggcgcggcgcggggctttgtgcgctccgcgtgtgcgcgaggggagcgcggccgggggcggtgccccgcggtgcgggggggctgcgaggggaacaaaggctgcgtgcggggtgtgtgcgtgggggggtgagcagggggtgtgggcgcggcggtcgggctgtaacccccccctgcacccccctccccgagttgctgagcacggcccggcttcgggtgcggggctccgtgcggggcgtggcgcggggctcgccgtgccgggcggggggtggcggcaggtgggggtgccgggcggggcggggccgcctcgggccggggagggctcgggggaggggcgcggcggcccccggagcgccggcggagcaggaggaccaaggccctggcgaaggccgtggcctcgatactgtcatagtagtaccagtgtgcaggtcccaatggctggtactaatgtgacagtctcggggacgcgggcctggacgccggcatccgggctcaggacccccctctctagagcctctgctaaccatgttcatgccttcttctttttcctacagctcctgggcaacgtgctggttattgtgaccggtcgctagccaccatggtgagcaagggcgaggagctgttcaccggggtggtgcccatcctggtcgagctggacggcgacgtaaacggccacaagttcagcgtgtccggcgagggcgagggcgatgccacctacggcaagctgaccctgaagttcatctgcaccaccggcaagctgcccgtgccctggcccaccctcgtgaccaccctgacctacggcgtgcagtgcttcagccgctaccccgaccacatgaagcagcacgacttcttcaagtccgccatgcccgaaggctacgtccaggagcgcaccatcttcttcaaggacgacggcaactacaagacccgcgccgaggtgaagttcgagggcgacaccctggtgaaccgcatcgagctgaagggcatcgacttcaaggaggacggcaacatcctggggcacaagctggagtacaactacaacagccacaacgtctatatcatggccgacaagcagaagaacggcatcaaggtgaacttcaagatccgccacaacatcgaggacggcagcgtgcagctcgccgaccactaccagcagaacacccccatcggcgacggccccgtgctgctgcccgacaaccactacctgagcacccagtccgccctgagcaaagaccccaacgagaagcgcgatcacatggtcctgctggagttcgtgaccgccgccgggatcactctcggcatggacgagctgtacaagtaacctgcaggcgccggcggagcaggaggaccaaggccctggcgaaggccgtggcctcgatactgtcatagtagtaccagtgtgcaggtcccaatggctggtactaatgtgacagtctcggggacgcgggcctggacgccggcatccgggctcaggacccccctcgagctcgctgatcagcctcgactgtgccttctagttgccagccatctgttgtttgcccctcccccgtgccttccttgaccctggaaggtgccactcccactgtcctttcctaataaaatgaggaaattgcatcgcattgtctgagtaggtgtcattctattctggggggtggggtggggcaggacagcaagggggaggattgggaagacaatagcaggcatgctggggatgcggtgggctctatggaagcttgaattcagctgacgtgcctcggaccgctaggaacccctagtgatggagttggccactccctctctgcgcgctcgctcgctcactgaggccgggcgaccaaaggtcgcccgacgcccgggctttgcccgggcggcctcagtgagcgagcgagcgcgcag

SEQ ID NO: 201 - DNA, 2982 bp, synthetic construct
  misc_feature 1..2982: note = Description of Artificial Sequence: Syntheticpolynucleotide
  source 1..2982: mol_type = other DNA
ctgcgcgctcgctcgctcactgaggccgcccgggcgtcgggcgacctttggtcgcccggcctcagtgagcgagcgagcgcgcagagagggagtggccaactccatcactaggggttcctgcggccgcacgcgtgacattgattattgactagttattaatagtaatcaattacggggtcattagttcatagcccatatatggagttccgcgttacataacttacggtaaatggcccgcctggctgaccgcccaacgacccccgcccattgacgtcaataatgacgtatgttcccatagtaacgccaatagggactttccattgacgtcaatgggtggactatttacggtaaactgcccacttggcagtacatcaagtgtatcatatgccaagtacgccccctattgacgtcaatgacggtaaatggcccgcctggcattatgcccagtacatgaccttatgggactttcctacttggcagtacatctacgtattagtcatcgctattaccatgggtcgaggtgagccccacgttctgcttcactctccccatctcccccccctccccacccccaattttgtatttatttattttttaattattttgtgcagcgatgggggcggggggggggggggcgcgcgccaggcggggcggggcggggcgaggggcggggcggggcgaggcggagaggtgcggcggcagccaatcagagcggcgcgctccgaaagtttccttttatggcgaggcggcggcggcggcggccctataaaaagcgaagcgcgcggcgggcgggagtcgctgcgttgccttcgccccgtgccccgctccgcgccgcctcgcgccgcccgccccggctctgactgaccgcgttactcccacaggtgagcgggcgggacggcccttctcctccgggctgtaattagcgcttggtttaatgacggctcgtttcttttctgtggctgcgtgaaagccttaaagggctccgggagggccctttgtgcgggggggagcggctcggggggtgcgtgcgtgtgtgtgtgcgtggggagcgccgcgtgcggcccgcgctgcccggcggctgtgagcgctgcgggcgcggcgcggggctttgtgcgctccgcgtgtgcgcgaggggagcgcggccgggggcggtgccccgcggtgcgggggggctgcgaggggaacaaaggctgcgtgcggggtgtgtgcgtgggggggtgagcagggggtgtgggcgcggcggtcgggctgtaacccccccctgcacccccctccccgagttgctgagcacggcccggcttcgggtgcggggctccgtgcggggcgtggcgcggggctcgccgtgccgggcggggggtggcggcaggtgggggtgccgggcggggcggggccgcctcgggccggggagggctcgggggaggggcgcggcggcccccggagcgccggcggtgtccccagagagcccgcaccagtgccatctgcttggccgatatactgtcatagtagtaccagcttgtgtctctccgctctgagctgtcactgcttgacggtaaatgggaaaagcaggacccgcagctgcgtccgcctcccctgcattctagagcctctgctaaccatgttcatgccttcttctttttcctacagctcctgggcaacgtgctggttattgtgaccggtcgctagccaccatggtgagcaagggcgaggagctgttcaccggggtggtgcccatcctggtcgagctggacggcgacgtaaacggccacaagttcagcgtgtccggcgagggcgagggcgatgccacctacggcaagctgaccctgaagttcatctgcaccaccggcaagctgcccgtgccctggcccaccctcgtgaccaccctgacctacggcgtgcagtgcttcagccgctaccccgaccacatgaagcagcacgacttcttcaagtccgccatgcccgaaggctacgtccaggagcgcaccatcttcttcaaggacgacggcaactacaagacccgcgccgaggtgaagttcgagggcgacaccctggtgaaccgcatcgagctgaagggcatcgacttcaaggaggacggcaacatcctggggcacaagctggagtacaactacaacagccacaacgtctatatcatggccgacaagcagaagaacggcatcaaggtgaacttcaagatccgccacaacatcgaggacggcagcgtgcagctcgccgaccactaccagcagaacacccccatcggcgacggccccgtgctgctgcccgacaaccactacctgagcacccagtccgccctgagcaaagaccccaacgagaagcgcgatcacatggtcctgctggagttcgtgaccgccgccgggatcactctcggcatggacgagctgtacaagtaacctgcaggcgccggcggtgtccccagagagcccgcaccagtgccatctgcttggccgatatactgtcatagtagtaccagcttgtgtctctccgctctgagctgtcactgcttgacggtaaatgggaaaagcaggacccgcagctgcgtccgcctcccctgcatgagctcgctgatcagcctcgactgtgccttctagttgccagccatctgttgtttgcccctcccccgtgccttccttgaccctggaaggtgccactcccactgtcctttcctaataaaatgaggaaattgcatcgcattgtctgagtaggtgtcattctattctggggggtggggtggggcaggacagcaagggggaggattgggaagacaatagcaggcatgctggggatgcggtgggctctatggaagcttgaattcagctgacgtgcctcggaccgctaggaacccctagtgatggagttggccactccctctctgcgcgctcgctcgctcactgaggccgggcgaccaaaggtcgcccgacgcccgggctttgcccgggcggcctcagtgagcgagcgagcgcgcag

SEQ ID NO: 202 - DNA, 2952 bp, synthetic construct
  misc_feature 1..2952: note = Description of Artificial Sequence: Syntheticpolynucleotide
  source 1..2952: mol_type = other DNA
ctgcgcgctcgctcgctcactgaggccgcccgggcgtcgggcgacctttggtcgcccggcctcagtgagcgagcgagcgcgcagagagggagtggccaactccatcactaggggttcctgcggccgcacgcgtgacattgattattgactagttattaatagtaatcaattacggggtcattagttcatagcccatatatggagttccgcgttacataacttacggtaaatggcccgcctggctgaccgcccaacgacccccgcccattgacgtcaataatgacgtatgttcccatagtaacgccaatagggactttccattgacgtcaatgggtggactatttacggtaaactgcccacttggcagtacatcaagtgtatcatatgccaagtacgccccctattgacgtcaatgacggtaaatggcccgcctggcattatgcccagtacatgaccttatgggactttcctacttggcagtacatctacgtattagtcatcgctattaccatgggtcgaggtgagccccacgttctgcttcactctccccatctcccccccctccccacccccaattttgtatttatttattttttaattattttgtgcagcgatgggggcggggggggggggggcgcgcgccaggcggggcggggcggggcgaggggcggggcggggcgaggcggagaggtgcggcggcagccaatcagagcggcgcgctccgaaagtttccttttatggcgaggcggcggcggcggcggccctataaaaagcgaagcgcgcggcgggcgggagtcgctgcgttgccttcgccccgtgccccgctccgcgccgcctcgcgccgcccgccccggctctgactgaccgcgttactcccacaggtgagcgggcgggacggcccttctcctccgggctgtaattagcgcttggtttaatgacggctcgtttcttttctgtggctgcgtgaaagccttaaagggctccgggagggccctttgtgcgggggggagcggctcggggggtgcgtgcgtgtgtgtgtgcgtggggagcgccgcgtgcggcccgcgctgcccggcggctgtgagcgctgcgggcgcggcgcggggctttgtgcgctccgcgtgtgcgcgaggggagcgcggccgggggcggtgccccgcggtgcgggggggctgcgaggggaacaaaggctgcgtgcggggtgtgtgcgtgggggggtgagcagggggtgtgggcgcggcggtcgggctgtaacccccccctgcacccccctccccgagttgctgagcacggcccggcttcgggtgcggggctccgtgcggggcgtggcgcggggctcgccgtgccgggcggggggtggcggcaggtgggggtgccgggcggggcggggccgcctcgggccggggagggctcgggggaggggcgcggcggcccccggagcgccggcgtcctctgagtgctgaaggcttgctgtaggctgtatgctgttgagaatcctgatggagcgggtttttgcctccaactgacccgctcataggattctcaacagtgtatgatgcctgttactagcattcacatggatctagagcctctgctaaccatgttcatgccttcttctttttcctacagctcctgggcaacgtgctggttattgtgaccggtcgctagccaccatggtgagcaagggcgaggagctgttcaccggggtggtgcccatcctggtcgagctggacggcgacgtaaacggccacaagttcagcgtgtccggcgagggcgagggcgatgccacctacggcaagctgaccctgaagttcatctgcaccaccggcaagctgcccgtgccctggcccaccctcgtgaccaccctgacctacggcgtgcagtgcttcagccgctaccccgaccacatgaagcagcacgacttcttcaagtccgccatgcccgaaggctacgtccaggagcgcaccatcttcttcaaggacgacggcaactacaagacccgcgccgaggtgaagttcgagggcgacaccctggtgaaccgcatcgagctgaagggcatcgacttcaaggaggacggcaacatcctggggcacaagctggagtacaactacaacagccacaacgtctatatcatggccgacaagcagaagaacggcatcaaggtgaacttcaagatccgccacaacatcgaggacggcagcgtgcagctcgccgaccactaccagcagaacacccccatcggcgacggccccgtgctgctgcccgacaaccactacctgagcacccagtccgccctgagcaaagaccccaacgagaagcgcgatcacatggtcctgctggagttcgtgaccgccgccgggatcactctcggcatggacgagctgtacaagtaacctgcaggcgccggcgtcctctgagtgctgaaggcttgctgtaggctgtatgctgttgagaatcctgatggagcgggtttttgcctccaactgacccgctcataggattctcaacagtgtatgatgcctgttactagcattcacatggagagctcgctgatcagcctcgactgtgccttctagttgccagccatctgttgtttgcccctcccccgtgccttccttgaccctggaaggtgccactcccactgtcctttcctaataaaatgaggaaattgcatcgcattgtctgagtaggtgtcattctattctggggggtggggtggggcaggacagcaagggggaggattgggaagacaatagcaggcatgctggggatgcggtgggctctatggaagcttgaattcagctgacgtgcctcggaccgctaggaacccctagtgatggagttggccactccctctctgcgcgctcgctcgctcactgaggccgggcgaccaaaggtcgcccgacgcccgggctttgcccgggcggcctcagtgagcgagcgagcgcgcag

SEQ ID NO: 203 - DNA, 2803 bp, synthetic construct
  misc_feature 1..2803: note = Description of Artificial Sequence: Syntheticpolynucleotide
  source 1..2803: mol_type = other DNA
ctgcgcgctcgctcgctcactgaggccgcccgggcgtcgggcgacctttggtcgcccggcctcagtgagcgagcgagcgcgcagagagggagtggccaactccatcactaggggttcctgcggccgcacgcgtgacattgattattgactagttattaatagtaatcaattacggggtcattagttcatagcccatatatggagttccgcgttacataacttacggtaaatggcccgcctggctgaccgcccaacgacccccgcccattgacgtcaataatgacgtatgttcccatagtaacgccaatagggactttccattgacgtcaatgggtggactatttacggtaaactgcccacttggcagtacatcaagtgtatcatatgccaagtacgccccctattgacgtcaatgacggtaaatggcccgcctggcattatgcccagtacatgaccttatgggactttcctacttggcagtacatctacgtattagtcatcgctattaccatgggtcgaggtgagccccacgttctgcttcactctccccatctcccccccctccccacccccaattttgtatttatttattttttaattattttgtgcagcgatgggggcggggggggggggggcgcgcgccaggcggggcggggcggggcgaggggcggggcggggcgaggcggagaggtgcggcggcagccaatcagagcggcgcgctccgaaagtttccttttatggcgaggcggcggcggcggcggccctataaaaagcgaagcgcgcggcgggcgggagtcgctgcgttgccttcgccccgtgccccgctccgcgccgcctcgcgccgcccgccccggctctgactgaccgcgttactcccacaggtgagcgggcgggacggcccttctcctccgggctgtaattagcgcttggtttaatgacggctcgtttcttttctgtggctgcgtgaaagccttaaagggctccgggagggccctttgtgcgggggggagcggctcggggggtgcgtgcgtgtgtgtgtgcgtggggagcgccgcgtgcggcccgcgctgcccggcggctgtgagcgctgcgggcgcggcgcggggctttgtgcgctccgcgtgtgcgcgaggggagcgcggccgggggcggtgccccgcggtgcgggggggctgcgaggggaacaaaggctgcgtgcggggtgtgtgcgtgggggggtgagcagggggtgtgggcgcggcggtcgggctgtaacccccccctgcacccccctccccgagttgctgagcacggcccggcttcgggtgcggggctccgtgcggggcgtggcgcggggctcgccgtgccgggcggggggtggcggcaggtgggggtgccgggcggggcggggccgcctcgggccggggagggctcgggggaggggcgcggcggcccccggagcgccggcgtcctctgagtgctgaaggcttgctgtaggctgtatgctgttgagaatcctgatggagcgggtttttgcctccaactgacccgctcataggattctcaacagtgtatgatgcctgttactagcattcacatggatctagagcctctgctaaccatgttcatgccttcttctttttcctacagctcctgggcaacgtgctggttattgtgaccggtcgctagccaccatggtgagcaagggcgaggagctgttcaccggggtggtgcccatcctggtcgagctggacggcgacgtaaacggccacaagttcagcgtgtccggcgagggcgagggcgatgccacctacggcaagctgaccctgaagttcatctgcaccaccggcaagctgcccgtgccctggcccaccctcgtgaccaccctgacctacggcgtgcagtgcttcagccgctaccccgaccacatgaagcagcacgacttcttcaagtccgccatgcccgaaggctacgtccaggagcgcaccatcttcttcaaggacgacggcaactacaagacccgcgccgaggtgaagttcgagggcgacaccctggtgaaccgcatcgagctgaagggcatcgacttcaaggaggacggcaacatcctggggcacaagctggagtacaactacaacagccacaacgtctatatcatggccgacaagcagaagaacggcatcaaggtgaacttcaagatccgccacaacatcgaggacggcagcgtgcagctcgccgaccactaccagcagaacacccccatcggcgacggccccgtgctgctgcccgacaaccactacctgagcacccagtccgccctgagcaaagaccccaacgagaagcgcgatcacatggtcctgctggagttcgtgaccgccgccgggatcactctcggcatggacgagctgtacaagtaagagctcgctgatcagcctcgactgtgccttctagttgccagccatctgttgtttgcccctcccccgtgccttccttgaccctggaaggtgccactcccactgtcctttcctaataaaatgaggaaattgcatcgcattgtctgagtaggtgtcattctattctggggggtggggtggggcaggacagcaagggggaggattgggaagacaatagcaggcatgctggggatgcggtgggctctatggaagcttgaattcagctgacgtgcctcggaccgctaggaacccctagtgatggagttggccactccctctctgcgcgctcgctcgctcactgaggccgggcgaccaaaggtcgcccgacgcccgggctttgcccgggcggcctcagtgagcgagcgagcgcgcag

SEQ ID NO: 204 - DNA, 3127 bp, synthetic construct
  misc_feature 1..3127: note = Description of Artificial Sequence: Syntheticpolynucleotide
  source 1..3127: mol_type = other DNA
ctgcgcgctcgctcgctcactgaggccgcccgggcgtcgggcgacctttggtcgcccggcctcagtgagcgagcgagcgcgcagagagggagtggccaactccatcactaggggttcctgcggccgcacgcgtgacattgattattgactagttattaatagtaatcaattacggggtcattagttcatagcccatatatggagttccgcgttacataacttacggtaaatggcccgcctggctgaccgcccaacgacccccgcccattgacgtcaataatgacgtatgttcccatagtaacgccaatagggactttccattgacgtcaatgggtggactatttacggtaaactgcccacttggcagtacatcaagtgtatcatatgccaagtacgccccctattgacgtcaatgacggtaaatggcccgcctggcattatgcccagtacatgaccttatgggactttcctacttggcagtacatctacgtattagtcatcgctattaccatgggtcgaggtgagccccacgttctgcttcactctccccatctcccccccctccccacccccaattttgtatttatttattttttaattattttgtgcagcgatgggggcggggggggggggggcgcgcgccaggcggggcggggcggggcgaggggcggggcggggcgaggcggagaggtgcggcggcagccaatcagagcggcgcgctccgaaagtttccttttatggcgaggcggcggcggcggcggccctataaaaagcgaagcgcgcggcgggcgggagtcgctgcgttgccttcgccccgtgccccgctccgcgccgcctcgcgccgcccgccccggctctgactgaccgcgttactcccacaggtgagcgggcgggacggcccttctcctccgggctgtaattagcgcttggtttaatgacggctcgtttcttttctgtggctgcgtgaaagccttaaagggctccgggagggccctttgtgcgggggggagcggctcggggggtgcgtgcgtgtgtgtgtgcgtggggagcgccgcgtgcggcccgcgctgcccggcggctgtgagcgctgcgggcgcggcgcggggctttgtgcgctccgcgtgtgcgcgaggggagcgcggccgggggcggtgccccgcggtgcgggggggctgcgaggggaacaaaggctgcgtgcggggtgtgtgcgtgggggggtgagcagggggtgtgggcgcggcggtcgggctgtaacccccccctgcacccccctccccgagttgctgagcacggcccggcttcgggtgcggggctccgtgcggggcgtggcgcggggctcgccgtgccgggcggggggtggcggcaggtgggggtgccgggcggggcggggccgcctcgggccggggagggctcgggggaggggcgcggcggcccccggagcgccggcggctgtcgaggcgcggcgagccgcagccattgccttttatggtaatcgtgcgagagggcgcagggacttcctttgtcccaaatctgtgcggagccgaaatctgggaggcgccgccgcaccccctctagcgggcgcggggcgaagcggtgcggcgccggcaggaaggaaatgggcggggagggccttcgtgcgtcgccgcgccgccgtccccttctccctctccagcctcggggctgtccgcggggggacggctgccttcgggggggacggggcagggcggggttcggcttctggcgtgtgaccggcggctctagagcctctgctaaccatgttcatgccttcttctttttcctacagctcctgggcaacgtgctggttattgtgaccggtcgctagccaccatggtgagcaagggcgaggagctgttcaccggggtggtgcccatcctggtcgagctggacggcgacgtaaacggccacaagttcagcgtgtccggcgagggcgagggcgatgccacctacggcaagctgaccctgaagttcatctgcaccaccggcaagctgcccgtgccctggcccaccctcgtgaccaccctgacctacggcgtgcagtgcttcagccgctaccccgaccacatgaagcagcacgacttcttcaagtccgccatgcccgaaggctacgtccaggagcgcaccatcttcttcaaggacgacggcaactacaagacccgcgccgaggtgaagttcgagggcgacaccctggtgaaccgcatcgagctgaagggcatcgacttcaaggaggacggcaacatcctggggcacaagctggagtacaactacaacagccacaacgtctatatcatggccgacaagcagaagaacggcatcaaggtgaacttcaagatccgccacaacatcgaggacggcagcgtgcagctcgccgaccactaccagcagaacacccccatcggcgacggccccgtgctgctgcccgacaaccactacctgagcacccagtccgccctgagcaaagaccccaacgagaagcgcgatcacatggtcctgctggagttcgtgaccgccgccgggatcactctcggcatggacgagctgtacaagtaacctgcaggcgccggcgtcctctgagtgctgaaggcttgctgtaggctgtatgctgttgagaatcctgatggagcgggtttttgcctccaactgacccgctcataggattctcaacagtgtatgatgcctgttactagcattcacatggagagctcgctgatcagcctcgactgtgccttctagttgccagccatctgttgtttgcccctcccccgtgccttccttgaccctggaaggtgccactcccactgtcctttcctaataaaatgaggaaattgcatcgcattgtctgagtaggtgtcattctattctggggggtggggtggggcaggacagcaagggggaggattgggaagacaatagcaggcatgctggggatgcggtgggctctatggaagcttgaattcagctgacgtgcctcggaccgctaggaacccctagtgatggagttggccactccctctctgcgcgctcgctcgctcactgaggccgggcgaccaaaggtcgcccgacgcccgggctttgcccgggcggcctcagtgagcgagcgagcgcgcag

SEQ ID NO: 205 - DNA, 2952 bp, synthetic construct
  misc_feature 1..2952: note = Description of Artificial Sequence: Syntheticpolynucleotide
  source 1..2952: mol_type = other DNA
ctgcgcgctcgctcgctcactgaggccgcccgggcgtcgggcgacctttggtcgcccggcctcagtgagcgagcgagcgcgcagagagggagtggccaactccatcactaggggttcctgcggccgcacgcgtgacattgattattgactagttattaatagtaatcaattacggggtcattagttcatagcccatatatggagttccgcgttacataacttacggtaaatggcccgcctggctgaccgcccaacgacccccgcccattgacgtcaataatgacgtatgttcccatagtaacgccaatagggactttccattgacgtcaatgggtggactatttacggtaaactgcccacttggcagtacatcaagtgtatcatatgccaagtacgccccctattgacgtcaatgacggtaaatggcccgcctggcattatgcccagtacatgaccttatgggactttcctacttggcagtacatctacgtattagtcatcgctattaccatgggtcgaggtgagccccacgttctgcttcactctccccatctcccccccctccccacccccaattttgtatttatttattttttaattattttgtgcagcgatgggggcggggggggggggggcgcgcgccaggcggggcggggcggggcgaggggcggggcggggcgaggcggagaggtgcggcggcagccaatcagagcggcgcgctccgaaagtttccttttatggcgaggcggcggcggcggcggccctataaaaagcgaagcgcgcggcgggcgggagtcgctgcgttgccttcgccccgtgccccgctccgcgccgcctcgcgccgcccgccccggctctgactgaccgcgttactcccacaggtgagcgggcgggacggcccttctcctccgggctgtaattagcgcttggtttaatgacggctcgtttcttttctgtggctgcgtgaaagccttaaagggctccgggagggccctttgtgcgggggggagcggctcggggggtgcgtgcgtgtgtgtgtgcgtggggagcgccgcgtgcggcccgcgctgcccggcggctgtgagcgctgcgggcgcggcgcggggctttgtgcgctccgcgtgtgcgcgaggggagcgcggccgggggcggtgccccgcggtgcgggggggctgcgaggggaacaaaggctgcgtgcggggtgtgtgcgtgggggggtgagcagggggtgtgggcgcggcggtcgggctgtaacccccccctgcacccccctccccgagttgctgagcacggcccggcttcgggtgcggggctccgtgcggggcgtggcgcggggctcgccgtgccgggcggggggtggcggcaggtgggggtgccgggcggggcggggccgcctcgggccggggagggctcgggggaggggcgcggcggcccccggagcgccggcgtcctctgagtgctgaaggcttgctgtaggctgtatgctgttgagtctcagagatgcccgggtttttgcctccaactgactcgggattctgagactcaacagtgtatgatgcctgttactagcattcacatggatctagagcctctgctaaccatgttcatgccttcttctttttcctacagctcctgggcaacgtgctggttattgtgaccggtcgctagccaccatggtgagcaagggcgaggagctgttcaccggggtggtgcccatcctggtcgagctggacggcgacgtaaacggccacaagttcagcgtgtccggcgagggcgagggcgatgccacctacggcaagctgaccctgaagttcatctgcaccaccggcaagctgcccgtgccctggcccaccctcgtgaccaccctgacctacggcgtgcagtgcttcagccgctaccccgaccacatgaagcagcacgacttcttcaagtccgccatgcccgaaggctacgtccaggagcgcaccatcttcttcaaggacgacggcaactacaagacccgcgccgaggtgaagttcgagggcgacaccctggtgaaccgcatcgagctgaagggcatcgacttcaaggaggacggcaacatcctggggcacaagctggagtacaactacaacagccacaacgtctatatcatggccgacaagcagaagaacggcatcaaggtgaacttcaagatccgccacaacatcgaggacggcagcgtgcagctcgccgaccactaccagcagaacacccccatcggcgacggccccgtgctgctgcccgacaaccactacctgagcacccagtccgccctgagcaaagaccccaacgagaagcgcgatcacatggtcctgctggagttcgtgaccgccgccgggatcactctcggcatggacgagctgtacaagtaacctgcaggcgccggcgtcctctgagtgctgaaggcttgctgtaggctgtatgctgttgagtctcagagatgcccgggtttttgcctccaactgactcgggattctgagactcaacagtgtatgatgcctgttactagcattcacatggagagctcgctgatcagcctcgactgtgccttctagttgccagccatctgttgtttgcccctcccccgtgccttccttgaccctggaaggtgccactcccactgtcctttcctaataaaatgaggaaattgcatcgcattgtctgagtaggtgtcattctattctggggggtggggtggggcaggacagcaagggggaggattgggaagacaatagcaggcatgctggggatgcggtgggctctatggaagcttgaattcagctgacgtgcctcggaccgctaggaacccctagtgatggagttggccactccctctctgcgcgctcgctcgctcactgaggccgggcgaccaaaggtcgcccgacgcccgggctttgcccgggcggcctcagtgagcgagcgagcgcgcag

SEQ ID NO: 206 - DNA, 2952 bp, synthetic construct
  misc_feature 1..2952: note = Description of Artificial Sequence: Syntheticpolynucleotide
  source 1..2952: mol_type = other DNA
ctgcgcgctcgctcgctcactgaggccgcccgggcgtcgggcgacctttggtcgcccggcctcagtgagcgagcgagcgcgcagagagggagtggccaactccatcactaggggttcctgcggccgcacgcgtgacattgattattgactagttattaatagtaatcaattacggggtcattagttcatagcccatatatggagttccgcgttacataacttacggtaaatggcccgcctggctgaccgcccaacgacccccgcccattgacgtcaataatgacgtatgttcccatagtaacgccaatagggactttccattgacgtcaatgggtggactatttacggtaaactgcccacttggcagtacatcaagtgtatcatatgccaagtacgccccctattgacgtcaatgacggtaaatggcccgcctggcattatgcccagtacatgaccttatgggactttcctacttggcagtacatctacgtattagtcatcgctattaccatgggtcgaggtgagccccacgttctgcttcactctccccatctcccccccctccccacccccaattttgtatttatttattttttaattattttgtgcagcgatgggggcggggggggggggggcgcgcgccaggcggggcggggcggggcgaggggcggggcggggcgaggcggagaggtgcggcggcagccaatcagagcggcgcgctccgaaagtttccttttatggcgaggcggcggcggcggcggccctataaaaagcgaagcgcgcggcgggcgggagtcgctgcgttgccttcgccccgtgccccgctccgcgccgcctcgcgccgcccgccccggctctgactgaccgcgttactcccacaggtgagcgggcgggacggcccttctcctccgggctgtaattagcgcttggtttaatgacggctcgtttcttttctgtggctgcgtgaaagccttaaagggctccgggagggccctttgtgcgggggggagcggctcggggggtgcgtgcgtgtgtgtgtgcgtggggagcgccgcgtgcggcccgcgctgcccggcggctgtgagcgctgcgggcgcggcgcggggctttgtgcgctccgcgtgtgcgcgaggggagcgcggccgggggcggtgccccgcggtgcgggggggctgcgaggggaacaaaggctgcgtgcggggtgtgtgcgtgggggggtgagcagggggtgtgggcgcggcggtcgggctgtaacccccccctgcacccccctccccgagttgctgagcacggcccggcttcgggtgcggggctccgtgcggggcgtggcgcggggctcgccgtgccgggcggggggtggcggcaggtgggggtgccgggcggggcggggccgcctcgggccggggagggctcgggggaggggcgcggcggcccccggagcgccggcgtcctctgagtgctgaaggcttgctgtaggctgtatgctgttgagtctcagagatgcccgggtttttgcctccaactgactcgggattctgagattcaacagtgtatgatgcctgttactagcattcacatggatctagagcctctgctaaccatgttcatgccttcttctttttcctacagctcctgggcaacgtgctggttattgtgaccggtcgctagccaccatggtgagcaagggcgaggagctgttcaccggggtggtgcccatcctggtcgagctggacggcgacgtaaacggccacaagttcagcgtgtccggcgagggcgagggcgatgccacctacggcaagctgaccctgaagttcatctgcaccaccggcaagctgcccgtgccctggcccaccctcgtgaccaccctgacctacggcgtgcagtgcttcagccgctaccccgaccacatgaagcagcacgacttcttcaagtccgccatgcccgaaggctacgtccaggagcgcaccatcttcttcaaggacgacggcaactacaagacccgcgccgaggtgaagttcgagggcgacaccctggtgaaccgcatcgagctgaagggcatcgacttcaaggaggacggcaacatcctggggcacaagctggagtacaactacaacagccacaacgtctatatcatggccgacaagcagaagaacggcatcaaggtgaacttcaagatccgccacaacatcgaggacggcagcgtgcagctcgccgaccactaccagcagaacacccccatcggcgacggccccgtgctgctgcccgacaaccactacctgagcacccagtccgccctgagcaaagaccccaacgagaagcgcgatcacatggtcctgctggagttcgtgaccgccgccgggatcactctcggcatggacgagctgtacaagtaacctgcaggcgccggcgtcctctgagtgctgaaggcttgctgtaggctgtatgctgttgagtctcagagatgcccgggtttttgcctccaactgactcgggattctgagattcaacagtgtatgatgcctgttactagcattcacatggagagctcgctgatcagcctcgactgtgccttctagttgccagccatctgttgtttgcccctcccccgtgccttccttgaccctggaaggtgccactcccactgtcctttcctaataaaatgaggaaattgcatcgcattgtctgagtaggtgtcattctattctggggggtggggtggggcaggacagcaagggggaggattgggaagacaatagcaggcatgctggggatgcggtgggctctatggaagcttgaattcagctgacgtgcctcggaccgctaggaacccctagtgatggagttggccactccctctctgcgcgctcgctcgctcactgaggccgggcgaccaaaggtcgcccgacgcccgggctttgcccgggcggcctcagtgagcgagcgagcgcgcag

SEQ ID NO: 207 - DNA, 2952 bp, synthetic construct
  misc_feature 1..2952: note = Description of Artificial Sequence: Syntheticpolynucleotide
  source 1..2952: mol_type = other DNA
ctgcgcgctcgctcgctcactgaggccgcccgggcgtcgggcgacctttggtcgcccggcctcagtgagcgagcgagcgcgcagagagggagtggccaactccatcactaggggttcctgcggccgcacgcgtgacattgattattgactagttattaatagtaatcaattacggggtcattagttcatagcccatatatggagttccgcgttacataacttacggtaaatggcccgcctggctgaccgcccaacgacccccgcccattgacgtcaataatgacgtatgttcccatagtaacgccaatagggactttccattgacgtcaatgggtggactatttacggtaaactgcccacttggcagtacatcaagtgtatcatatgccaagtacgccccctattgacgtcaatgacggtaaatggcccgcctggcattatgcccagtacatgaccttatgggactttcctacttggcagtacatctacgtattagtcatcgctattaccatgggtcgaggtgagccccacgttctgcttcactctccccatctcccccccctccccacccccaattttgtatttatttattttttaattattttgtgcagcgatgggggcggggggggggggggcgcgcgccaggcggggcggggcggggcgaggggcggggcggggcgaggcggagaggtgcggcggcagccaatcagagcggcgcgctccgaaagtttccttttatggcgaggcggcggcggcggcggccctataaaaagcgaagcgcgcggcgggcgggagtcgctgcgttgccttcgccccgtgccccgctccgcgccgcctcgcgccgcccgccccggctctgactgaccgcgttactcccacaggtgagcgggcgggacggcccttctcctccgggctgtaattagcgcttggtttaatgacggctcgtttcttttctgtggctgcgtgaaagccttaaagggctccgggagggccctttgtgcgggggggagcggctcggggggtgcgtgcgtgtgtgtgtgcgtggggagcgccgcgtgcggcccgcgctgcccggcggctgtgagcgctgcgggcgcggcgcggggctttgtgcgctccgcgtgtgcgcgaggggagcgcggccgggggcggtgccccgcggtgcgggggggctgcgaggggaacaaaggctgcgtgcggggtgtgtgcgtgggggggtgagcagggggtgtgggcgcggcggtcgggctgtaacccccccctgcacccccctccccgagttgctgagcacggcccggcttcgggtgcggggctccgtgcggggcgtggcgcggggctcgccgtgccgggcggggggtggcggcaggtgggggtgccgggcggggcggggccgcctcgggccggggagggctcgggggaggggcgcggcggcccccggagcgccggcgtcctctgagtgctgaaggcttgctgtaggctgtatgctgttgagtctcagagatgcccgggtttttgcctccaactgactcgggatcctgagattcaacagtgtatgatgcctgttactagcattcacatggatctagagcctctgctaaccatgttcatgccttcttctttttcctacagctcctgggcaacgtgctggttattgtgaccggtcgctagccaccatggtgagcaagggcgaggagctgttcaccggggtggtgcccatcctggtcgagctggacggcgacgtaaacggccacaagttcagcgtgtccggcgagggcgagggcgatgccacctacggcaagctgaccctgaagttcatctgcaccaccggcaagctgcccgtgccctggcccaccctcgtgaccaccctgacctacggcgtgcagtgcttcagccgctaccccgaccacatgaagcagcacgacttcttcaagtccgccatgcccgaaggctacgtccaggagcgcaccatcttcttcaaggacgacggcaactacaagacccgcgccgaggtgaagttcgagggcgacaccctggtgaaccgcatcgagctgaagggcatcgacttcaaggaggacggcaacatcctggggcacaagctggagtacaactacaacagccacaacgtctatatcatggccgacaagcagaagaacggcatcaaggtgaacttcaagatccgccacaacatcgaggacggcagcgtgcagctcgccgaccactaccagcagaacacccccatcggcgacggccccgtgctgctgcccgacaaccactacctgagcacccagtccgccctgagcaaagaccccaacgagaagcgcgatcacatggtcctgctggagttcgtgaccgccgccgggatcactctcggcatggacgagctgtacaagtaacctgcaggcgccggcgtcctctgagtgctgaaggcttgctgtaggctgtatgctgttgagtctcagagatgcccgggtttttgcctccaactgactcgggatcctgagattcaacagtgtatgatgcctgttactagcattcacatggagagctcgctgatcagcctcgactgtgccttctagttgccagccatctgttgtttgcccctcccccgtgccttccttgaccctggaaggtgccactcccactgtcctttcctaataaaatgaggaaattgcatcgcattgtctgagtaggtgtcattctattctggggggtggggtggggcaggacagcaagggggaggattgggaagacaatagcaggcatgctggggatgcggtgggctctatggaagcttgaattcagctgacgtgcctcggaccgctaggaacccctagtgatggagttggccactccctctctgcgcgctcgctcgctcactgaggccgggcgaccaaaggtcgcccgacgcccgggctttgcccgggcggcctcagtgagcgagcgagcgcgcag

SEQ ID NO: 208 - DNA, 2952 bp, synthetic construct
  misc_feature 1..2952: note = Description of Artificial Sequence: Syntheticpolynucleotide
  source 1..2952: mol_type = other DNA
ctgcgcgctcgctcgctcactgaggccgcccgggcgtcgggcgacctttggtcgcccggcctcagtgagcgagcgagcgcgcagagagggagtggccaactccatcactaggggttcctgcggccgcacgcgtgacattgattattgactagttattaatagtaatcaattacggggtcattagttcatagcccatatatggagttccgcgttacataacttacggtaaatggcccgcctggctgaccgcccaacgacccccgcccattgacgtcaataatgacgtatgttcccatagtaacgccaatagggactttccattgacgtcaatgggtggactatttacggtaaactgcccacttggcagtacatcaagtgtatcatatgccaagtacgccccctattgacgtcaatgacggtaaatggcccgcctggcattatgcccagtacatgaccttatgggactttcctacttggcagtacatctacgtattagtcatcgctattaccatgggtcgaggtgagccccacgttctgcttcactctccccatctcccccccctccccacccccaattttgtatttatttattttttaattattttgtgcagcgatgggggcggggggggggggggcgcgcgccaggcggggcggggcggggcgaggggcggggcggggcgaggcggagaggtgcggcggcagccaatcagagcggcgcgctccgaaagtttccttttatggcgaggcggcggcggcggcggccctataaaaagcgaagcgcgcggcgggcgggagtcgctgcgttgccttcgccccgtgccccgctccgcgccgcctcgcgccgcccgccccggctctgactgaccgcgttactcccacaggtgagcgggcgggacggcccttctcctccgggctgtaattagcgcttggtttaatgacggctcgtttcttttctgtggctgcgtgaaagccttaaagggctccgggagggccctttgtgcgggggggagcggctcggggggtgcgtgcgtgtgtgtgtgcgtggggagcgccgcgtgcggcccgcgctgcccggcggctgtgagcgctgcgggcgcggcgcggggctttgtgcgctccgcgtgtgcgcgaggggagcgcggccgggggcggtgccccgcggtgcgggggggctgcgaggggaacaaaggctgcgtgcggggtgtgtgcgtgggggggtgagcagggggtgtgggcgcggcggtcgggctgtaacccccccctgcacccccctccccgagttgctgagcacggcccggcttcgggtgcggggctccgtgcggggcgtggcgcggggctcgccgtgccgggcggggggtggcggcaggtgggggtgccgggcggggcggggccgcctcgggccggggagggctcgggggaggggcgcggcggcccccggagcgccggcgtcctctgagtgctgaaggcttgctgtaggctgtatgctgttgagtctcagagatgcccggaagtttgcctccaactctttcgggatcctgagattcaacagtgtatgatgcctgttactagcattcacatggatctagagcctctgctaaccatgttcatgccttcttctttttcctacagctcctgggcaacgtgctggttattgtgaccggtcgctagccaccatggtgagcaagggcgaggagctgttcaccggggtggtgcccatcctggtcgagctggacggcgacgtaaacggccacaagttcagcgtgtccggcgagggcgagggcgatgccacctacggcaagctgaccctgaagttcatctgcaccaccggcaagctgcccgtgccctggcccaccctcgtgaccaccctgacctacggcgtgcagtgcttcagccgctaccccgaccacatgaagcagcacgacttcttcaagtccgccatgcccgaaggctacgtccaggagcgcaccatcttcttcaaggacgacggcaactacaagacccgcgccgaggtgaagttcgagggcgacaccctggtgaaccgcatcgagctgaagggcatcgacttcaaggaggacggcaacatcctggggcacaagctggagtacaactacaacagccacaacgtctatatcatggccgacaagcagaagaacggcatcaaggtgaacttcaagatccgccacaacatcgaggacggcagcgtgcagctcgccgaccactaccagcagaacacccccatcggcgacggccccgtgctgctgcccgacaaccactacctgagcacccagtccgccctgagcaaagaccccaacgagaagcgcgatcacatggtcctgctggagttcgtgaccgccgccgggatcactctcggcatggacgagctgtacaagtaacctgcaggcgccggcgtcctctgagtgctgaaggcttgctgtaggctgtatgctgttgagtctcagagatgcccggaagtttgcctccaactctttcgggatcctgagattcaacagtgtatgatgcctgttactagcattcacatggagagctcgctgatcagcctcgactgtgccttctagttgccagccatctgttgtttgcccctcccccgtgccttccttgaccctggaaggtgccactcccactgtcctttcctaataaaatgaggaaattgcatcgcattgtctgagtaggtgtcattctattctggggggtggggtggggcaggacagcaagggggaggattgggaagacaatagcaggcatgctggggatgcggtgggctctatggaagcttgaattcagctgacgtgcctcggaccgctaggaacccctagtgatggagttggccactccctctctgcgcgctcgctcgctcactgaggccgggcgaccaaaggtcgcccgacgcccgggctttgcccgggcggcctcagtgagcgagcgagcgcgcag

SEQ ID NO: 209 - DNA, 2952 bp, synthetic construct
  misc_feature 1..2952: note = Description of Artificial Sequence: Syntheticpolynucleotide
  source 1..2952: mol_type = other DNA
ctgcgcgctcgctcgctcactgaggccgcccgggcgtcgggcgacctttggtcgcccggcctcagtgagcgagcgagcgcgcagagagggagtggccaactccatcactaggggttcctgcggccgcacgcgtgacattgattattgactagttattaatagtaatcaattacggggtcattagttcatagcccatatatggagttccgcgttacataacttacggtaaatggcccgcctggctgaccgcccaacgacccccgcccattgacgtcaataatgacgtatgttcccatagtaacgccaatagggactttccattgacgtcaatgggtggactatttacggtaaactgcccacttggcagtacatcaagtgtatcatatgccaagtacgccccctattgacgtcaatgacggtaaatggcccgcctggcattatgcccagtacatgaccttatgggactttcctacttggcagtacatctacgtattagtcatcgctattaccatgggtcgaggtgagccccacgttctgcttcactctccccatctcccccccctccccacccccaattttgtatttatttattttttaattattttgtgcagcgatgggggcggggggggggggggcgcgcgccaggcggggcggggcggggcgaggggcggggcggggcgaggcggagaggtgcggcggcagccaatcagagcggcgcgctccgaaagtttccttttatggcgaggcggcggcggcggcggccctataaaaagcgaagcgcgcggcgggcgggagtcgctgcgttgccttcgccccgtgccccgctccgcgccgcctcgcgccgcccgccccggctctgactgaccgcgttactcccacaggtgagcgggcgggacggcccttctcctccgggctgtaattagcgcttggtttaatgacggctcgtttcttttctgtggctgcgtgaaagccttaaagggctccgggagggccctttgtgcgggggggagcggctcggggggtgcgtgcgtgtgtgtgtgcgtggggagcgccgcgtgcggcccgcgctgcccggcggctgtgagcgctgcgggcgcggcgcggggctttgtgcgctccgcgtgtgcgcgaggggagcgcggccgggggcggtgccccgcggtgcgggggggctgcgaggggaacaaaggctgcgtgcggggtgtgtgcgtgggggggtgagcagggggtgtgggcgcggcggtcgggctgtaacccccccctgcacccccctccccgagttgctgagcacggcccggcttcgggtgcggggctccgtgcggggcgtggcgcggggctcgccgtgccgggcggggggtggcggcaggtgggggtgccgggcggggcggggccgcctcgggccggggagggctcgggggaggggcgcggcggcccccggagcgccggcgtcctctgagtgctgaaggcttgctgtaggctgtatgctgttctcgaagtgcttctgccgggtttttgcctccaactgactcggcgaatacttcgagaacagtgtatgatgcctgttactagcattcacatggatctagagcctctgctaaccatgttcatgccttcttctttttcctacagctcctgggcaacgtgctggttattgtgaccggtcgctagccaccatggtgagcaagggcgaggagctgttcaccggggtggtgcccatcctggtcgagctggacggcgacgtaaacggccacaagttcagcgtgtccggcgagggcgagggcgatgccacctacggcaagctgaccctgaagttcatctgcaccaccggcaagctgcccgtgccctggcccaccctcgtgaccaccctgacctacggcgtgcagtgcttcagccgctaccccgaccacatgaagcagcacgacttcttcaagtccgccatgcccgaaggctacgtccaggagcgcaccatcttcttcaaggacgacggcaactacaagacccgcgccgaggtgaagttcgagggcgacaccctggtgaaccgcatcgagctgaagggcatcgacttcaaggaggacggcaacatcctggggcacaagctggagtacaactacaacagccacaacgtctatatcatggccgacaagcagaagaacggcatcaaggtgaacttcaagatccgccacaacatcgaggacggcagcgtgcagctcgccgaccactaccagcagaacacccccatcggcgacggccccgtgctgctgcccgacaaccactacctgagcacccagtccgccctgagcaaagaccccaacgagaagcgcgatcacatggtcctgctggagttcgtgaccgccgccgggatcactctcggcatggacgagctgtacaagtaacctgcaggcgccggcgtcctctgagtgctgaaggcttgctgtaggctgtatgctgttctcgaagtgcttctgccgggtttttgcctccaactgactcggcgaatacttcgagaacagtgtatgatgcctgttactagcattcacatggagagctcgctgatcagcctcgactgtgccttctagttgccagccatctgttgtttgcccctcccccgtgccttccttgaccctggaaggtgccactcccactgtcctttcctaataaaatgaggaaattgcatcgcattgtctgagtaggtgtcattctattctggggggtggggtggggcaggacagcaagggggaggattgggaagacaatagcaggcatgctggggatgcggtgggctctatggaagcttgaattcagctgacgtgcctcggaccgctaggaacccctagtgatggagttggccactccctctctgcgcgctcgctcgctcactgaggccgggcgaccaaaggtcgcccgacgcccgggctttgcccgggcggcctcagtgagcgagcgagcgcgcag

SEQ ID NO: 210 - DNA, 2952 bp, synthetic construct
  misc_feature 1..2952: note = Description of Artificial Sequence: Syntheticpolynucleotide
  source 1..2952: mol_type = other DNA
ctgcgcgctcgctcgctcactgaggccgcccgggcgtcgggcgacctttggtcgcccggcctcagtgagcgagcgagcgcgcagagagggagtggccaactccatcactaggggttcctgcggccgcacgcgtgacattgattattgactagttattaatagtaatcaattacggggtcattagttcatagcccatatatggagttccgcgttacataacttacggtaaatggcccgcctggctgaccgcccaacgacccccgcccattgacgtcaataatgacgtatgttcccatagtaacgccaatagggactttccattgacgtcaatgggtggactatttacggtaaactgcccacttggcagtacatcaagtgtatcatatgccaagtacgccccctattgacgtcaatgacggtaaatggcccgcctggcattatgcccagtacatgaccttatgggactttcctacttggcagtacatctacgtattagtcatcgctattaccatgggtcgaggtgagccccacgttctgcttcactctccccatctcccccccctccccacccccaattttgtatttatttattttttaattattttgtgcagcgatgggggcggggggggggggggcgcgcgccaggcggggcggggcggggcgaggggcggggcggggcgaggcggagaggtgcggcggcagccaatcagagcggcgcgctccgaaagtttccttttatggcgaggcggcggcggcggcggccctataaaaagcgaagcgcgcggcgggcgggagtcgctgcgttgccttcgccccgtgccccgctccgcgccgcctcgcgccgcccgccccggctctgactgaccgcgttactcccacaggtgagcgggcgggacggcccttctcctccgggctgtaattagcgcttggtttaatgacggctcgtttcttttctgtggctgcgtgaaagccttaaagggctccgggagggccctttgtgcgggggggagcggctcggggggtgcgtgcgtgtgtgtgtgcgtggggagcgccgcgtgcggcccgcgctgcccggcggctgtgagcgctgcgggcgcggcgcggggctttgtgcgctccgcgtgtgcgcgaggggagcgcggccgggggcggtgccccgcggtgcgggggggctgcgaggggaacaaaggctgcgtgcggggtgtgtgcgtgggggggtgagcagggggtgtgggcgcggcggtcgggctgtaacccccccctgcacccccctccccgagttgctgagcacggcccggcttcgggtgcggggctccgtgcggggcgtggcgcggggctcgccgtgccgggcggggggtggcggcaggtgggggtgccgggcggggcggggccgcctcgggccggggagggctcgggggaggggcgcggcggcccccggagcgccggcgtcctctgagtgctgaaggcttgctgtaggctgtatgctgttctccaccttgaccacgcgtgtttttgcctccaactgacatgtgggtaaggtggagaacagtgtatgatgcctgttactagcattcacatggatctagagcctctgctaaccatgttcatgccttcttctttttcctacagctcctgggcaacgtgctggttattgtgaccggtcgctagccaccatggtgagcaagggcgaggagctgttcaccggggtggtgcccatcctggtcgagctggacggcgacgtaaacggccacaagttcagcgtgtccggcgagggcgagggcgatgccacctacggcaagctgaccctgaagttcatctgcaccaccggcaagctgcccgtgccctggcccaccctcgtgaccaccctgacctacggcgtgcagtgcttcagccgctaccccgaccacatgaagcagcacgacttcttcaagtccgccatgcccgaaggctacgtccaggagcgcaccatcttcttcaaggacgacggcaactacaagacccgcgccgaggtgaagttcgagggcgacaccctggtgaaccgcatcgagctgaagggcatcgacttcaaggaggacggcaacatcctggggcacaagctggagtacaactacaacagccacaacgtctatatcatggccgacaagcagaagaacggcatcaaggtgaacttcaagatccgccacaacatcgaggacggcagcgtgcagctcgccgaccactaccagcagaacacccccatcggcgacggccccgtgctgctgcccgacaaccactacctgagcacccagtccgccctgagcaaagaccccaacgagaagcgcgatcacatggtcctgctggagttcgtgaccgccgccgggatcactctcggcatggacgagctgtacaagtaacctgcaggcgccggcgtcctctgagtgctgaaggcttgctgtaggctgtatgctgttctccaccttgaccacgcgtgtttttgcctccaactgacatgtgggtaaggtggagaacagtgtatgatgcctgttactagcattcacatggagagctcgctgatcagcctcgactgtgccttctagttgccagccatctgttgtttgcccctcccccgtgccttccttgaccctggaaggtgccactcccactgtcctttcctaataaaatgaggaaattgcatcgcattgtctgagtaggtgtcattctattctggggggtggggtggggcaggacagcaagggggaggattgggaagacaatagcaggcatgctggggatgcggtgggctctatggaagcttgaattcagctgacgtgcctcggaccgctaggaacccctagtgatggagttggccactccctctctgcgcgctcgctcgctcactgaggccgggcgaccaaaggtcgcccgacgcccgggctttgcccgggcggcctcagtgagcgagcgagcgcgcag

SEQ ID NO: 211 - DNA, 2952 bp, synthetic construct
  misc_feature 1..2952: note = Description of Artificial Sequence: Syntheticpolynucleotide
  source 1..2952: mol_type = other DNA
ctgcgcgctcgctcgctcactgaggccgcccgggcgtcgggcgacctttggtcgcccggcctcagtgagcgagcgagcgcgcagagagggagtggccaactccatcactaggggttcctgcggccgcacgcgtgacattgattattgactagttattaatagtaatcaattacggggtcattagttcatagcccatatatggagttccgcgttacataacttacggtaaatggcccgcctggctgaccgcccaacgacccccgcccattgacgtcaataatgacgtatgttcccatagtaacgccaatagggactttccattgacgtcaatgggtggactatttacggtaaactgcccacttggcagtacatcaagtgtatcatatgccaagtacgccccctattgacgtcaatgacggtaaatggcccgcctggcattatgcccagtacatgaccttatgggactttcctacttggcagtacatctacgtattagtcatcgctattaccatgggtcgaggtgagccccacgttctgcttcactctccccatctcccccccctccccacccccaattttgtatttatttattttttaattattttgtgcagcgatgggggcggggggggggggggcgcgcgccaggcggggcggggcggggcgaggggcggggcggggcgaggcggagaggtgcggcggcagccaatcagagcggcgcgctccgaaagtttccttttatggcgaggcggcggcggcggcggccctataaaaagcgaagcgcgcggcgggcgggagtcgctgcgttgccttcgccccgtgccccgctccgcgccgcctcgcgccgcccgccccggctctgactgaccgcgttactcccacaggtgagcgggcgggacggcccttctcctccgggctgtaattagcgcttggtttaatgacggctcgtttcttttctgtggctgcgtgaaagccttaaagggctccgggagggccctttgtgcgggggggagcggctcggggggtgcgtgcgtgtgtgtgtgcgtggggagcgccgcgtgcggcccgcgctgcccggcggctgtgagcgctgcgggcgcggcgcggggctttgtgcgctccgcgtgtgcgcgaggggagcgcggccgggggcggtgccccgcggtgcgggggggctgcgaggggaacaaaggctgcgtgcggggtgtgtgcgtgggggggtgagcagggggtgtgggcgcggcggtcgggctgtaacccccccctgcacccccctccccgagttgctgagcacggcccggcttcgggtgcggggctccgtgcggggcgtggcgcggggctcgccgtgccgggcggggggtggcggcaggtgggggtgccgggcggggcggggccgcctcgggccggggagggctcgggggaggggcgcggcggcccccggagcgccggcgtcctctgagtgctgaaggcttgctgtaggctgtatgctgatactgtcatagtagtaccaggtttttgcctccaactgacctggtctatatgacagtatcagtgtatgatgcctgttactagcattcacatggatctagagcctctgctaaccatgttcatgccttcttctttttcctacagctcctgggcaacgtgctggttattgtgaccggtcgctagccaccatggtgagcaagggcgaggagctgttcaccggggtggtgcccatcctggtcgagctggacggcgacgtaaacggccacaagttcagcgtgtccggcgagggcgagggcgatgccacctacggcaagctgaccctgaagttcatctgcaccaccggcaagctgcccgtgccctggcccaccctcgtgaccaccctgacctacggcgtgcagtgcttcagccgctaccccgaccacatgaagcagcacgacttcttcaagtccgccatgcccgaaggctacgtccaggagcgcaccatcttcttcaaggacgacggcaactacaagacccgcgccgaggtgaagttcgagggcgacaccctggtgaaccgcatcgagctgaagggcatcgacttcaaggaggacggcaacatcctggggcacaagctggagtacaactacaacagccacaacgtctatatcatggccgacaagcagaagaacggcatcaaggtgaacttcaagatccgccacaacatcgaggacggcagcgtgcagctcgccgaccactaccagcagaacacccccatcggcgacggccccgtgctgctgcccgacaaccactacctgagcacccagtccgccctgagcaaagaccccaacgagaagcgcgatcacatggtcctgctggagttcgtgaccgccgccgggatcactctcggcatggacgagctgtacaagtaacctgcaggcgccggcgtcctctgagtgctgaaggcttgctgtaggctgtatgctgatactgtcatagtagtaccaggtttttgcctccaactgacctggtctatatgacagtatcagtgtatgatgcctgttactagcattcacatggagagctcgctgatcagcctcgactgtgccttctagttgccagccatctgttgtttgcccctcccccgtgccttccttgaccctggaaggtgccactcccactgtcctttcctaataaaatgaggaaattgcatcgcattgtctgagtaggtgtcattctattctggggggtggggtggggcaggacagcaagggggaggattgggaagacaatagcaggcatgctggggatgcggtgggctctatggaagcttgaattcagctgacgtgcctcggaccgctaggaacccctagtgatggagttggccactccctctctgcgcgctcgctcgctcactgaggccgggcgaccaaaggtcgcccgacgcccgggctttgcccgggcggcctcagtgagcgagcgagcgcgcag

SEQ ID NO: 212 - DNA, 2952 bp, synthetic construct
  misc_feature 1..2952: note = Description of Artificial Sequence: Syntheticpolynucleotide
  source 1..2952: mol_type = other DNA
ctgcgcgctcgctcgctcactgaggccgcccgggcgtcgggcgacctttggtcgcccggcctcagtgagcgagcgagcgcgcagagagggagtggccaactccatcactaggggttcctgcggccgcacgcgtgacattgattattgactagttattaatagtaatcaattacggggtcattagttcatagcccatatatggagttccgcgttacataacttacggtaaatggcccgcctggctgaccgcccaacgacccccgcccattgacgtcaataatgacgtatgttcccatagtaacgccaatagggactttccattgacgtcaatgggtggactatttacggtaaactgcccacttggcagtacatcaagtgtatcatatgccaagtacgccccctattgacgtcaatgacggtaaatggcccgcctggcattatgcccagtacatgaccttatgggactttcctacttggcagtacatctacgtattagtcatcgctattaccatgggtcgaggtgagccccacgttctgcttcactctccccatctcccccccctccccacccccaattttgtatttatttattttttaattattttgtgcagcgatgggggcggggggggggggggcgcgcgccaggcggggcggggcggggcgaggggcggggcggggcgaggcggagaggtgcggcggcagccaatcagagcggcgcgctccgaaagtttccttttatggcgaggcggcggcggcggcggccctataaaaagcgaagcgcgcggcgggcgggagtcgctgcgttgccttcgccccgtgccccgctccgcgccgcctcgcgccgcccgccccggctctgactgaccgcgttactcccacaggtgagcgggcgggacggcccttctcctccgggctgtaattagcgcttggtttaatgacggctcgtttcttttctgtggctgcgtgaaagccttaaagggctccgggagggccctttgtgcgggggggagcggctcggggggtgcgtgcgtgtgtgtgtgcgtggggagcgccgcgtgcggcccgcgctgcccggcggctgtgagcgctgcgggcgcggcgcggggctttgtgcgctccgcgtgtgcgcgaggggagcgcggccgggggcggtgccccgcggtgcgggggggctgcgaggggaacaaaggctgcgtgcggggtgtgtgcgtgggggggtgagcagggggtgtgggcgcggcggtcgggctgtaacccccccctgcacccccctccccgagttgctgagcacggcccggcttcgggtgcggggctccgtgcggggcgtggcgcggggctcgccgtgccgggcggggggtggcggcaggtgggggtgccgggcggggcggggccgcctcgggccggggagggctcgggggaggggcgcggcggcccccggagcgccggcgtcctctgagtgctgaaggcttgctgtaggctgtatgctgtagtcggaggtgatgtcgggggtttttgcctccaactgactcctgcataccttcgattacagtgtatgatgcctgttactagcattcacatggatctagagcctctgctaaccatgttcatgccttcttctttttcctacagctcctgggcaacgtgctggttattgtgaccggtcgctagccaccatggtgagcaagggcgaggagctgttcaccggggtggtgcccatcctggtcgagctggacggcgacgtaaacggccacaagttcagcgtgtccggcgagggcgagggcgatgccacctacggcaagctgaccctgaagttcatctgcaccaccggcaagctgcccgtgccctggcccaccctcgtgaccaccctgacctacggcgtgcagtgcttcagccgctaccccgaccacatgaagcagcacgacttcttcaagtccgccatgcccgaaggctacgtccaggagcgcaccatcttcttcaaggacgacggcaactacaagacccgcgccgaggtgaagttcgagggcgacaccctggtgaaccgcatcgagctgaagggcatcgacttcaaggaggacggcaacatcctggggcacaagctggagtacaactacaacagccacaacgtctatatcatggccgacaagcagaagaacggcatcaaggtgaacttcaagatccgccacaacatcgaggacggcagcgtgcagctcgccgaccactaccagcagaacacccccatcggcgacggccccgtgctgctgcccgacaaccactacctgagcacccagtccgccctgagcaaagaccccaacgagaagcgcgatcacatggtcctgctggagttcgtgaccgccgccgggatcactctcggcatggacgagctgtacaagtaacctgcaggcgccggcgtcctctgagtgctgaaggcttgctgtaggctgtatgctgtagtcggaggtgatgtcgggggtttttgcctccaactgactcctgcataccttcgattacagtgtatgatgcctgttactagcattcacatggagagctcgctgatcagcctcgactgtgccttctagttgccagccatctgttgtttgcccctcccccgtgccttccttgaccctggaaggtgccactcccactgtcctttcctaataaaatgaggaaattgcatcgcattgtctgagtaggtgtcattctattctggggggtggggtggggcaggacagcaagggggaggattgggaagacaatagcaggcatgctggggatgcggtgggctctatggaagcttgaattcagctgacgtgcctcggaccgctaggaacccctagtgatggagttggccactccctctctgcgcgctcgctcgctcactgaggccgggcgaccaaaggtcgcccgacgcccgggctttgcccgggcggcctcagtgagcgagcgagcgcgcag

SEQ ID NO: 213 - DNA, 2940 bp, synthetic construct
  misc_feature 1..2940: note = Description of Artificial Sequence: Syntheticpolynucleotide
  source 1..2940: mol_type = other DNA
ctgcgcgctcgctcgctcactgaggccgcccgggcgtcgggcgacctttggtcgcccggcctcagtgagcgagcgagcgcgcagagagggagtggccaactccatcactaggggttcctgcggccgcacgcgtgacattgattattgactagttattaatagtaatcaattacggggtcattagttcatagcccatatatggagttccgcgttacataacttacggtaaatggcccgcctggctgaccgcccaacgacccccgcccattgacgtcaataatgacgtatgttcccatagtaacgccaatagggactttccattgacgtcaatgggtggactatttacggtaaactgcccacttggcagtacatcaagtgtatcatatgccaagtacgccccctattgacgtcaatgacggtaaatggcccgcctggcattatgcccagtacatgaccttatgggactttcctacttggcagtacatctacgtattagtcatcgctattaccatgggtcgaggtgagccccacgttctgcttcactctccccatctcccccccctccccacccccaattttgtatttatttattttttaattattttgtgcagcgatgggggcggggggggggggggcgcgcgccaggcggggcggggcggggcgaggggcggggcggggcgaggcggagaggtgcggcggcagccaatcagagcggcgcgctccgaaagtttccttttatggcgaggcggcggcggcggcggccctataaaaagcgaagcgcgcggcgggcgggagtcgctgcgttgccttcgccccgtgccccgctccgcgccgcctcgcgccgcccgccccggctctgactgaccgcgttactcccacaggtgagcgggcgggacggcccttctcctccgggctgtaattagcgcttggtttaatgacggctcgtttcttttctgtggctgcgtgaaagccttaaagggctccgggagggccctttgtgcgggggggagcggctcggggggtgcgtgcgtgtgtgtgtgcgtggggagcgccgcgtgcggcccgcgctgcccggcggctgtgagcgctgcgggcgcggcgcggggctttgtgcgctccgcgtgtgcgcgaggggagcgcggccgggggcggtgccccgcggtgcgggggggctgcgaggggaacaaaggctgcgtgcggggtgtgtgcgtgggggggtgagcagggggtgtgggcgcggcggtcgggctgtaacccccccctgcacccccctccccgagttgctgagcacggcccggcttcgggtgcggggctccgtgcggggcgtggcgcggggctcgccgtgccgggcggggggtggcggcaggtgggggtgccgggcggggcggggccgcctcgggccggggagggctcgggggaggggcgcggcggcccccggagcgccggcgcatagctcttatgatagcaatgtcagcagtgcctttgagaatcctgatggagcgggttaagattctaaaattatcacgctccatgagtgattctcagaagtaaggttgaccatactctacagttgtgtctagagcctctgctaaccatgttcatgccttcttctttttcctacagctcctgggcaacgtgctggttattgtgaccggtcgctagccaccatggtgagcaagggcgaggagctgttcaccggggtggtgcccatcctggtcgagctggacggcgacgtaaacggccacaagttcagcgtgtccggcgagggcgagggcgatgccacctacggcaagctgaccctgaagttcatctgcaccaccggcaagctgcccgtgccctggcccaccctcgtgaccaccctgacctacggcgtgcagtgcttcagccgctaccccgaccacatgaagcagcacgacttcttcaagtccgccatgcccgaaggctacgtccaggagcgcaccatcttcttcaaggacgacggcaactacaagacccgcgccgaggtgaagttcgagggcgacaccctggtgaaccgcatcgagctgaagggcatcgacttcaaggaggacggcaacatcctggggcacaagctggagtacaactacaacagccacaacgtctatatcatggccgacaagcagaagaacggcatcaaggtgaacttcaagatccgccacaacatcgaggacggcagcgtgcagctcgccgaccactaccagcagaacacccccatcggcgacggccccgtgctgctgcccgacaaccactacctgagcacccagtccgccctgagcaaagaccccaacgagaagcgcgatcacatggtcctgctggagttcgtgaccgccgccgggatcactctcggcatggacgagctgtacaagtaacctgcaggcgccggcgcatagctcttatgatagcaatgtcagcagtgcctttgagaatcctgatggagcgggttaagattctaaaattatcacgctccatgagtgattctcagaagtaaggttgaccatactctacagttgtggagctcgctgatcagcctcgactgtgccttctagttgccagccatctgttgtttgcccctcccccgtgccttccttgaccctggaaggtgccactcccactgtcctttcctaataaaatgaggaaattgcatcgcattgtctgagtaggtgtcattctattctggggggtggggtggggcaggacagcaagggggaggattgggaagacaatagcaggcatgctggggatgcggtgggctctatggaagcttgaattcagctgacgtgcctcggaccgctaggaacccctagtgatggagttggccactccctctctgcgcgctcgctcgctcactgaggccgggcgaccaaaggtcgcccgacgcccgggctttgcccgggcggcctcagtgagcgagcgagcgcgcag

SEQ ID NO: 214 - DNA, 2978 bp, synthetic construct
  misc_feature 1..2978: note = Description of Artificial Sequence: Syntheticpolynucleotide
  source 1..2978: mol_type = other DNA
ctgcgcgctcgctcgctcactgaggccgcccgggcgtcgggcgacctttggtcgcccggcctcagtgagcgagcgagcgcgcagagagggagtggccaactccatcactaggggttcctgcggccgcacgcgtgacattgattattgactagttattaatagtaatcaattacggggtcattagttcatagcccatatatggagttccgcgttacataacttacggtaaatggcccgcctggctgaccgcccaacgacccccgcccattgacgtcaataatgacgtatgttcccatagtaacgccaatagggactttccattgacgtcaatgggtggactatttacggtaaactgcccacttggcagtacatcaagtgtatcatatgccaagtacgccccctattgacgtcaatgacggtaaatggcccgcctggcattatgcccagtacatgaccttatgggactttcctacttggcagtacatctacgtattagtcatcgctattaccatgggtcgaggtgagccccacgttctgcttcactctccccatctcccccccctccccacccccaattttgtatttatttattttttaattattttgtgcagcgatgggggcggggggggggggggcgcgcgccaggcggggcggggcggggcgaggggcggggcggggcgaggcggagaggtgcggcggcagccaatcagagcggcgcgctccgaaagtttccttttatggcgaggcggcggcggcggcggccctataaaaagcgaagcgcgcggcgggcgggagtcgctgcgttgccttcgccccgtgccccgctccgcgccgcctcgcgccgcccgccccggctctgactgaccgcgttactcccacaggtgagcgggcgggacggcccttctcctccgggctgtaattagcgcttggtttaatgacggctcgtttcttttctgtggctgcgtgaaagccttaaagggctccgggagggccctttgtgcgggggggagcggctcggggggtgcgtgcgtgtgtgtgtgcgtggggagcgccgcgtgcggcccgcgctgcccggcggctgtgagcgctgcgggcgcggcgcggggctttgtgcgctccgcgtgtgcgcgaggggagcgcggccgggggcggtgccccgcggtgcgggggggctgcgaggggaacaaaggctgcgtgcggggtgtgtgcgtgggggggtgagcagggggtgtgggcgcggcggtcgggctgtaacccccccctgcacccccctccccgagttgctgagcacggcccggcttcgggtgcggggctccgtgcggggcgtggcgcggggctcgccgtgccgggcggggggtggcggcaggtgggggtgccgggcggggcggggccgcctcgggccggggagggctcgggggaggggcgcggcggcccccggagcgccggcggagcaggaggaccaaggccctggcgaaggccgtggcctcgttgagaatcctgatggagcggtgtgcaggtcccaatggccgctccataaggattctccacggggacgcgggcctggacgccggcatccgggctcaggacccccctctctagagcctctgctaaccatgttcatgccttcttctttttcctacagctcctgggcaacgtgctggttattgtgaccggtcgctagccaccatggtgagcaagggcgaggagctgttcaccggggtggtgcccatcctggtcgagctggacggcgacgtaaacggccacaagttcagcgtgtccggcgagggcgagggcgatgccacctacggcaagctgaccctgaagttcatctgcaccaccggcaagctgcccgtgccctggcccaccctcgtgaccaccctgacctacggcgtgcagtgcttcagccgctaccccgaccacatgaagcagcacgacttcttcaagtccgccatgcccgaaggctacgtccaggagcgcaccatcttcttcaaggacgacggcaactacaagacccgcgccgaggtgaagttcgagggcgacaccctggtgaaccgcatcgagctgaagggcatcgacttcaaggaggacggcaacatcctggggcacaagctggagtacaactacaacagccacaacgtctatatcatggccgacaagcagaagaacggcatcaaggtgaacttcaagatccgccacaacatcgaggacggcagcgtgcagctcgccgaccactaccagcagaacacccccatcggcgacggccccgtgctgctgcccgacaaccactacctgagcacccagtccgccctgagcaaagaccccaacgagaagcgcgatcacatggtcctgctggagttcgtgaccgccgccgggatcactctcggcatggacgagctgtacaagtaacctgcaggcgccggcggagcaggaggaccaaggccctggcgaaggccgtggcctcgttgagaatcctgatggagcggtgtgcaggtcccaatggccgctccataaggattctccacggggacgcgggcctggacgccggcatccgggctcaggacccccctcgagctcgctgatcagcctcgactgtgccttctagttgccagccatctgttgtttgcccctcccccgtgccttccttgaccctggaaggtgccactcccactgtcctttcctaataaaatgaggaaattgcatcgcattgtctgagtaggtgtcattctattctggggggtggggtggggcaggacagcaagggggaggattgggaagacaatagcaggcatgctggggatgcggtgggctctatggaagcttgaattcagctgacgtgcctcggaccgctaggaacccctagtgatggagttggccactccctctctgcgcgctcgctcgctcactgaggccgggcgaccaaaggtcgcccgacgcccgggctttgcccgggcggcctcagtgagcgagcgagcgcgcag

SEQ ID NO: 215 - DNA, 2982 bp, synthetic construct
  misc_feature 1..2982: note = Description of Artificial Sequence: Syntheticpolynucleotide
  source 1..2982: mol_type = other DNA
ctgcgcgctcgctcgctcactgaggccgcccgggcgtcgggcgacctttggtcgcccggcctcagtgagcgagcgagcgcgcagagagggagtggccaactccatcactaggggttcctgcggccgcacgcgtgacattgattattgactagttattaatagtaatcaattacggggtcattagttcatagcccatatatggagttccgcgttacataacttacggtaaatggcccgcctggctgaccgcccaacgacccccgcccattgacgtcaataatgacgtatgttcccatagtaacgccaatagggactttccattgacgtcaatgggtggactatttacggtaaactgcccacttggcagtacatcaagtgtatcatatgccaagtacgccccctattgacgtcaatgacggtaaatggcccgcctggcattatgcccagtacatgaccttatgggactttcctacttggcagtacatctacgtattagtcatcgctattaccatgggtcgaggtgagccccacgttctgcttcactctccccatctcccccccctccccacccccaattttgtatttatttattttttaattattttgtgcagcgatgggggcggggggggggggggcgcgcgccaggcggggcggggcggggcgaggggcggggcggggcgaggcggagaggtgcggcggcagccaatcagagcggcgcgctccgaaagtttccttttatggcgaggcggcggcggcggcggccctataaaaagcgaagcgcgcggcgggcgggagtcgctgcgttgccttcgccccgtgccccgctccgcgccgcctcgcgccgcccgccccggctctgactgaccgcgttactcccacaggtgagcgggcgggacggcccttctcctccgggctgtaattagcgcttggtttaatgacggctcgtttcttttctgtggctgcgtgaaagccttaaagggctccgggagggccctttgtgcgggggggagcggctcggggggtgcgtgcgtgtgtgtgtgcgtggggagcgccgcgtgcggcccgcgctgcccggcggctgtgagcgctgcgggcgcggcgcggggctttgtgcgctccgcgtgtgcgcgaggggagcgcggccgggggcggtgccccgcggtgcgggggggctgcgaggggaacaaaggctgcgtgcggggtgtgtgcgtgggggggtgagcagggggtgtgggcgcggcggtcgggctgtaacccccccctgcacccccctccccgagttgctgagcacggcccggcttcgggtgcggggctccgtgcggggcgtggcgcggggctcgccgtgccgggcggggggtggcggcaggtgggggtgccgggcggggcggggccgcctcgggccggggagggctcgggggaggggcgcggcggcccccggagcgccggcggtgtccccagagagcccgcaccagtgccatctgcttggccgatttgagaatcctgatggagcggcttgtgtctctccgctctgagccgggccatcagattctcatatgggaaaagcaggacccgcagctgcgtccgcctcccctgcattctagagcctctgctaaccatgttcatgccttcttctttttcctacagctcctgggcaacgtgctggttattgtgaccggtcgctagccaccatggtgagcaagggcgaggagctgttcaccggggtggtgcccatcctggtcgagctggacggcgacgtaaacggccacaagttcagcgtgtccggcgagggcgagggcgatgccacctacggcaagctgaccctgaagttcatctgcaccaccggcaagctgcccgtgccctggcccaccctcgtgaccaccctgacctacggcgtgcagtgcttcagccgctaccccgaccacatgaagcagcacgacttcttcaagtccgccatgcccgaaggctacgtccaggagcgcaccatcttcttcaaggacgacggcaactacaagacccgcgccgaggtgaagttcgagggcgacaccctggtgaaccgcatcgagctgaagggcatcgacttcaaggaggacggcaacatcctggggcacaagctggagtacaactacaacagccacaacgtctatatcatggccgacaagcagaagaacggcatcaaggtgaacttcaagatccgccacaacatcgaggacggcagcgtgcagctcgccgaccactaccagcagaacacccccatcggcgacggccccgtgctgctgcccgacaaccactacctgagcacccagtccgccctgagcaaagaccccaacgagaagcgcgatcacatggtcctgctggagttcgtgaccgccgccgggatcactctcggcatggacgagctgtacaagtaacctgcaggcgccggcggtgtccccagagagcccgcaccagtgccatctgcttggccgatttgagaatcctgatggagcggcttgtgtctctccgctctgagccgggccatcagattctcatatgggaaaagcaggacccgcagctgcgtccgcctcccctgcatgagctcgctgatcagcctcgactgtgccttctagttgccagccatctgttgtttgcccctcccccgtgccttccttgaccctggaaggtgccactcccactgtcctttcctaataaaatgaggaaattgcatcgcattgtctgagtaggtgtcattctattctggggggtggggtggggcaggacagcaagggggaggattgggaagacaatagcaggcatgctggggatgcggtgggctctatggaagcttgaattcagctgacgtgcctcggaccgctaggaacccctagtgatggagttggccactccctctctgcgcgctcgctcgctcactgaggccgggcgaccaaaggtcgcccgacgcccgggctttgcccgggcggcctcagtgagcgagcgagcgcgcag

SEQ ID NO: 216 - DNA, 2980 bp, synthetic construct
  misc_feature 1..2980: note = Description of Artificial Sequence: Syntheticpolynucleotide
  source 1..2980: mol_type = other DNA
ctgcgcgctcgctcgctcactgaggccgcccgggcgtcgggcgacctttggtcgcccggcctcagtgagcgagcgagcgcgcagagagggagtggccaactccatcactaggggttcctgcggccgcacgcgtgacattgattattgactagttattaatagtaatcaattacggggtcattagttcatagcccatatatggagttccgcgttacataacttacggtaaatggcccgcctggctgaccgcccaacgacccccgcccattgacgtcaataatgacgtatgttcccatagtaacgccaatagggactttccattgacgtcaatgggtggactatttacggtaaactgcccacttggcagtacatcaagtgtatcatatgccaagtacgccccctattgacgtcaatgacggtaaatggcccgcctggcattatgcccagtacatgaccttatgggactttcctacttggcagtacatctacgtattagtcatcgctattaccatgggtcgaggtgagccccacgttctgcttcactctccccatctcccccccctccccacccccaattttgtatttatttattttttaattattttgtgcagcgatgggggcggggggggggggggcgcgcgccaggcggggcggggcggggcgaggggcggggcggggcgaggcggagaggtgcggcggcagccaatcagagcggcgcgctccgaaagtttccttttatggcgaggcggcggcggcggcggccctataaaaagcgaagcgcgcggcgggcgggagtcgctgcgttgccttcgccccgtgccccgctccgcgccgcctcgcgccgcccgccccggctctgactgaccgcgttactcccacaggtgagcgggcgggacggcccttctcctccgggctgtaattagcgcttggtttaatgacggctcgtttcttttctgtggctgcgtgaaagccttaaagggctccgggagggccctttgtgcgggggggagcggctcggggggtgcgtgcgtgtgtgtgtgcgtggggagcgccgcgtgcggcccgcgctgcccggcggctgtgagcgctgcgggcgcggcgcggggctttgtgcgctccgcgtgtgcgcgaggggagcgcggccgggggcggtgccccgcggtgcgggggggctgcgaggggaacaaaggctgcgtgcggggtgtgtgcgtgggggggtgagcagggggtgtgggcgcggcggtcgggctgtaacccccccctgcacccccctccccgagttgctgagcacggcccggcttcgggtgcggggctccgtgcggggcgtggcgcggggctcgccgtgccgggcggggggtggcggcaggtgggggtgccgggcggggcggggccgcctcgggccggggagggctcgggggaggggcgcggcggcccccggagcgccggcgtgaagttaacaccttcgtggctacagagtttccttagcagagctgttgagaatcctgatggagcgggtgtctaaactatcccgctccatccggattctacatagctactgctaggcaatccttccctcgataaatgtcttggcatcgtctagagcctctgctaaccatgttcatgccttcttctttttcctacagctcctgggcaacgtgctggttattgtgaccggtcgctagccaccatggtgagcaagggcgaggagctgttcaccggggtggtgcccatcctggtcgagctggacggcgacgtaaacggccacaagttcagcgtgtccggcgagggcgagggcgatgccacctacggcaagctgaccctgaagttcatctgcaccaccggcaagctgcccgtgccctggcccaccctcgtgaccaccctgacctacggcgtgcagtgcttcagccgctaccccgaccacatgaagcagcacgacttcttcaagtccgccatgcccgaaggctacgtccaggagcgcaccatcttcttcaaggacgacggcaactacaagacccgcgccgaggtgaagttcgagggcgacaccctggtgaaccgcatcgagctgaagggcatcgacttcaaggaggacggcaacatcctggggcacaagctggagtacaactacaacagccacaacgtctatatcatggccgacaagcagaagaacggcatcaaggtgaacttcaagatccgccacaacatcgaggacggcagcgtgcagctcgccgaccactaccagcagaacacccccatcggcgacggccccgtgctgctgcccgacaaccactacctgagcacccagtccgccctgagcaaagaccccaacgagaagcgcgatcacatggtcctgctggagttcgtgaccgccgccgggatcactctcggcatggacgagctgtacaagtaacctgcaggcgccggcgtgaagttaacaccttcgtggctacagagtttccttagcagagctgttgagaatcctgatggagcgggtgtctaaactatcccgctccatccggattctacatagctactgctaggcaatccttccctcgataaatgtcttggcatcggagctcgctgatcagcctcgactgtgccttctagttgccagccatctgttgtttgcccctcccccgtgccttccttgaccctggaaggtgccactcccactgtcctttcctaataaaatgaggaaattgcatcgcattgtctgagtaggtgtcattctattctggggggtggggtggggcaggacagcaagggggaggattgggaagacaatagcaggcatgctggggatgcggtgggctctatggaagcttgaattcagctgacgtgcctcggaccgctaggaacccctagtgatggagttggccactccctctctgcgcgctcgctcgctcactgaggccgggcgaccaaaggtcgcccgacgcccgggctttgcccgggcggcctcagtgagcgagcgagcgcgcag

SEQ ID NO: 217 - DNA, 2928 bp, synthetic construct
  misc_feature 1..2928: note = Description of Artificial Sequence: Syntheticpolynucleotide
  source 1..2928: mol_type = other DNA
ctgcgcgctcgctcgctcactgaggccgcccgggcgtcgggcgacctttggtcgcccggcctcagtgagcgagcgagcgcgcagagagggagtggccaactccatcactaggggttcctgcggccgcacgcgtgacattgattattgactagttattaatagtaatcaattacggggtcattagttcatagcccatatatggagttccgcgttacataacttacggtaaatggcccgcctggctgaccgcccaacgacccccgcccattgacgtcaataatgacgtatgttcccatagtaacgccaatagggactttccattgacgtcaatgggtggactatttacggtaaactgcccacttggcagtacatcaagtgtatcatatgccaagtacgccccctattgacgtcaatgacggtaaatggcccgcctggcattatgcccagtacatgaccttatgggactttcctacttggcagtacatctacgtattagtcatcgctattaccatgggtcgaggtgagccccacgttctgcttcactctccccatctcccccccctccccacccccaattttgtatttatttattttttaattattttgtgcagcgatgggggcggggggggggggggcgcgcgccaggcggggcggggcggggcgaggggcggggcggggcgaggcggagaggtgcggcggcagccaatcagagcggcgcgctccgaaagtttccttttatggcgaggcggcggcggcggcggccctataaaaagcgaagcgcgcggcgggcgggagtcgctgcgttgccttcgccccgtgccccgctccgcgccgcctcgcgccgcccgccccggctctgactgaccgcgttactcccacaggtgagcgggcgggacggcccttctcctccgggctgtaattagcgcttggtttaatgacggctcgtttcttttctgtggctgcgtgaaagccttaaagggctccgggagggccctttgtgcgggggggagcggctcggggggtgcgtgcgtgtgtgtgtgcgtggggagcgccgcgtgcggcccgcgctgcccggcggctgtgagcgctgcgggcgcggcgcggggctttgtgcgctccgcgtgtgcgcgaggggagcgcggccgggggcggtgccccgcggtgcgggggggctgcgaggggaacaaaggctgcgtgcggggtgtgtgcgtgggggggtgagcagggggtgtgggcgcggcggtcgggctgtaacccccccctgcacccccctccccgagttgctgagcacggcccggcttcgggtgcggggctccgtgcggggcgtggcgcggggctcgccgtgccgggcggggggtggcggcaggtgggggtgccgggcggggcggggccgcctcgggccggggagggctcgggggaggggcgcggcggcccccggagcgccggcggccgctggacccctccactctgctgtggccttgagaatcctgatggagcgggattgctgtcccaaactcccgctccatcggattctcaaggctacagtgaggggcgagctccttctcctgctctagagcctctgctaaccatgttcatgccttcttctttttcctacagctcctgggcaacgtgctggttattgtgaccggtcgctagccaccatggtgagcaagggcgaggagctgttcaccggggtggtgcccatcctggtcgagctggacggcgacgtaaacggccacaagttcagcgtgtccggcgagggcgagggcgatgccacctacggcaagctgaccctgaagttcatctgcaccaccggcaagctgcccgtgccctggcccaccctcgtgaccaccctgacctacggcgtgcagtgcttcagccgctaccccgaccacatgaagcagcacgacttcttcaagtccgccatgcccgaaggctacgtccaggagcgcaccatcttcttcaaggacgacggcaactacaagacccgcgccgaggtgaagttcgagggcgacaccctggtgaaccgcatcgagctgaagggcatcgacttcaaggaggacggcaacatcctggggcacaagctggagtacaactacaacagccacaacgtctatatcatggccgacaagcagaagaacggcatcaaggtgaacttcaagatccgccacaacatcgaggacggcagcgtgcagctcgccgaccactaccagcagaacacccccatcggcgacggccccgtgctgctgcccgacaaccactacctgagcacccagtccgccctgagcaaagaccccaacgagaagcgcgatcacatggtcctgctggagttcgtgaccgccgccgggatcactctcggcatggacgagctgtacaagtaacctgcaggcgccggcggccgctggacccctccactctgctgtggccttgagaatcctgatggagcgggattgctgtcccaaactcccgctccatcggattctcaaggctacagtgaggggcgagctccttctcctgcgagctcgctgatcagcctcgactgtgccttctagttgccagccatctgttgtttgcccctcccccgtgccttccttgaccctggaaggtgccactcccactgtcctttcctaataaaatgaggaaattgcatcgcattgtctgagtaggtgtcattctattctggggggtggggtggggcaggacagcaagggggaggattgggaagacaatagcaggcatgctggggatgcggtgggctctatggaagcttgaattcagctgacgtgcctcggaccgctaggaacccctagtgatggagttggccactccctctctgcgcgctcgctcgctcactgaggccgggcgaccaaaggtcgcccgacgcccgggctttgcccgggcggcctcagtgagcgagcgagcgcgcag

SEQ ID NO: 218 - DNA, 2984 bp, synthetic construct
  misc_feature 1..2984: note = Description of Artificial Sequence: Syntheticpolynucleotide
  source 1..2984: mol_type = other DNA
ctgcgcgctcgctcgctcactgaggccgcccgggcgtcgggcgacctttggtcgcccggcctcagtgagcgagcgagcgcgcagagagggagtggccaactccatcactaggggttcctgcggccgcacgcgtgacattgattattgactagttattaatagtaatcaattacggggtcattagttcatagcccatatatggagttccgcgttacataacttacggtaaatggcccgcctggctgaccgcccaacgacccccgcccattgacgtcaataatgacgtatgttcccatagtaacgccaatagggactttccattgacgtcaatgggtggactatttacggtaaactgcccacttggcagtacatcaagtgtatcatatgccaagtacgccccctattgacgtcaatgacggtaaatggcccgcctggcattatgcccagtacatgaccttatgggactttcctacttggcagtacatctacgtattagtcatcgctattaccatgggtcgaggtgagccccacgttctgcttcactctccccatctcccccccctccccacccccaattttgtatttatttattttttaattattttgtgcagcgatgggggcggggggggggggggcgcgcgccaggcggggcggggcggggcgaggggcggggcggggcgaggcggagaggtgcggcggcagccaatcagagcggcgcgctccgaaagtttccttttatggcgaggcggcggcggcggcggccctataaaaagcgaagcgcgcggcgggcgggagtcgctgcgttgccttcgccccgtgccccgctccgcgccgcctcgcgccgcccgccccggctctgactgaccgcgttactcccacaggtgagcgggcgggacggcccttctcctccgggctgtaattagcgcttggtttaatgacggctcgtttcttttctgtggctgcgtgaaagccttaaagggctccgggagggccctttgtgcgggggggagcggctcggggggtgcgtgcgtgtgtgtgtgcgtggggagcgccgcgtgcggcccgcgctgcccggcggctgtgagcgctgcgggcgcggcgcggggctttgtgcgctccgcgtgtgcgcgaggggagcgcggccgggggcggtgccccgcggtgcgggggggctgcgaggggaacaaaggctgcgtgcggggtgtgtgcgtgggggggtgagcagggggtgtgggcgcggcggtcgggctgtaacccccccctgcacccccctccccgagttgctgagcacggcccggcttcgggtgcggggctccgtgcggggcgtggcgcggggctcgccgtgccgggcggggggtggcggcaggtgggggtgccgggcggggcggggccgcctcgggccggggagggctcgggggaggggcgcggcggcccccggagcgccggcgctccccagctcctggggggagctgcttgcctccccccgttttgagaatcctgatggagcggactggtgaggtaacaggatccgccgtccatctttattctcactatggggcgaggactcagccggcaccctgtgcacagccagcgagggtctagagcctctgctaaccatgttcatgccttcttctttttcctacagctcctgggcaacgtgctggttattgtgaccggtcgctagccaccatggtgagcaagggcgaggagctgttcaccggggtggtgcccatcctggtcgagctggacggcgacgtaaacggccacaagttcagcgtgtccggcgagggcgagggcgatgccacctacggcaagctgaccctgaagttcatctgcaccaccggcaagctgcccgtgccctggcccaccctcgtgaccaccctgacctacggcgtgcagtgcttcagccgctaccccgaccacatgaagcagcacgacttcttcaagtccgccatgcccgaaggctacgtccaggagcgcaccatcttcttcaaggacgacggcaactacaagacccgcgccgaggtgaagttcgagggcgacaccctggtgaaccgcatcgagctgaagggcatcgacttcaaggaggacggcaacatcctggggcacaagctggagtacaactacaacagccacaacgtctatatcatggccgacaagcagaagaacggcatcaaggtgaacttcaagatccgccacaacatcgaggacggcagcgtgcagctcgccgaccactaccagcagaacacccccatcggcgacggccccgtgctgctgcccgacaaccactacctgagcacccagtccgccctgagcaaagaccccaacgagaagcgcgatcacatggtcctgctggagttcgtgaccgccgccgggatcactctcggcatggacgagctgtacaagtaacctgcaggcgccggcgctccccagctcctggggggagctgcttgcctccccccgttttgagaatcctgatggagcggactggtgaggtaacaggatccgccgtccatctttattctcactatggggcgaggactcagccggcaccctgtgcacagccagcgaggggagctcgctgatcagcctcgactgtgccttctagttgccagccatctgttgtttgcccctcccccgtgccttccttgaccctggaaggtgccactcccactgtcctttcctaataaaatgaggaaattgcatcgcattgtctgagtaggtgtcattctattctggggggtggggtggggcaggacagcaagggggaggattgggaagacaatagcaggcatgctggggatgcggtgggctctatggaagcttgaattcagctgacgtgcctcggaccgctaggaacccctagtgatggagttggccactccctctctgcgcgctcgctcgctcactgaggccgggcgaccaaaggtcgcccgacgcccgggctttgcccgggcggcctcagtgagcgagcgagcgcgcag

SEQ ID NO: 219 - DNA, 2966 bp, synthetic construct
  misc_feature 1..2966: note = Description of Artificial Sequence: Syntheticpolynucleotide
  source 1..2966: mol_type = other DNA
ctgcgcgctcgctcgctcactgaggccgcccgggcgtcgggcgacctttggtcgcccggcctcagtgagcgagcgagcgcgcagagagggagtggccaactccatcactaggggttcctgcggccgcacgcgtgacattgattattgactagttattaatagtaatcaattacggggtcattagttcatagcccatatatggagttccgcgttacataacttacggtaaatggcccgcctggctgaccgcccaacgacccccgcccattgacgtcaataatgacgtatgttcccatagtaacgccaatagggactttccattgacgtcaatgggtggactatttacggtaaactgcccacttggcagtacatcaagtgtatcatatgccaagtacgccccctattgacgtcaatgacggtaaatggcccgcctggcattatgcccagtacatgaccttatgggactttcctacttggcagtacatctacgtattagtcatcgctattaccatgggtcgaggtgagccccacgttctgcttcactctccccatctcccccccctccccacccccaattttgtatttatttattttttaattattttgtgcagcgatgggggcggggggggggggggcgcgcgccaggcggggcggggcggggcgaggggcggggcggggcgaggcggagaggtgcggcggcagccaatcagagcggcgcgctccgaaagtttccttttatggcgaggcggcggcggcggcggccctataaaaagcgaagcgcgcggcgggcgggagtcgctgcgttgccttcgccccgtgccccgctccgcgccgcctcgcgccgcccgccccggctctgactgaccgcgttactcccacaggtgagcgggcgggacggcccttctcctccgggctgtaattagcgcttggtttaatgacggctcgtttcttttctgtggctgcgtgaaagccttaaagggctccgggagggccctttgtgcgggggggagcggctcggggggtgcgtgcgtgtgtgtgtgcgtggggagcgccgcgtgcggcccgcgctgcccggcggctgtgagcgctgcgggcgcggcgcggggctttgtgcgctccgcgtgtgcgcgaggggagcgcggccgggggcggtgccccgcggtgcgggggggctgcgaggggaacaaaggctgcgtgcggggtgtgtgcgtgggggggtgagcagggggtgtgggcgcggcggtcgggctgtaacccccccctgcacccccctccccgagttgctgagcacggcccggcttcgggtgcggggctccgtgcggggcgtggcgcggggctcgccgtgccgggcggggggtggcggcaggtgggggtgccgggcggggcggggccgcctcgggccggggagggctcgggggaggggcgcggcggcccccggagcgccggcgagggtcggcaggccgcagagtgtgactcctgttctgtgtttgagaatcctgatggagcgggtgaacagtctcagtcccgctcccaggaaatggtcaaaaacagagcagagacagatccacgagggcctccggagcacctttctagagcctctgctaaccatgttcatgccttcttctttttcctacagctcctgggcaacgtgctggttattgtgaccggtcgctagccaccatggtgagcaagggcgaggagctgttcaccggggtggtgcccatcctggtcgagctggacggcgacgtaaacggccacaagttcagcgtgtccggcgagggcgagggcgatgccacctacggcaagctgaccctgaagttcatctgcaccaccggcaagctgcccgtgccctggcccaccctcgtgaccaccctgacctacggcgtgcagtgcttcagccgctaccccgaccacatgaagcagcacgacttcttcaagtccgccatgcccgaaggctacgtccaggagcgcaccatcttcttcaaggacgacggcaactacaagacccgcgccgaggtgaagttcgagggcgacaccctggtgaaccgcatcgagctgaagggcatcgacttcaaggaggacggcaacatcctggggcacaagctggagtacaactacaacagccacaacgtctatatcatggccgacaagcagaagaacggcatcaaggtgaacttcaagatccgccacaacatcgaggacggcagcgtgcagctcgccgaccactaccagcagaacacccccatcggcgacggccccgtgctgctgcccgacaaccactacctgagcacccagtccgccctgagcaaagaccccaacgagaagcgcgatcacatggtcctgctggagttcgtgaccgccgccgggatcactctcggcatggacgagctgtacaagtaacctgcaggcgccggcgagggtcggcaggccgcagagtgtgactcctgttctgtgtttgagaatcctgatggagcgggtgaacagtctcagtcccgctcccaggaaatggtcaaaaacagagcagagacagatccacgagggcctccggagcaccttgagctcgctgatcagcctcgactgtgccttctagttgccagccatctgttgtttgcccctcccccgtgccttccttgaccctggaaggtgccactcccactgtcctttcctaataaaatgaggaaattgcatcgcattgtctgagtaggtgtcattctattctggggggtggggtggggcaggacagcaagggggaggattgggaagacaatagcaggcatgctggggatgcggtgggctctatggaagcttgaattcagctgacgtgcctcggaccgctaggaacccctagtgatggagttggccactccctctctgcgcgctcgctcgctcactgaggccgggcgaccaaaggtcgcccgacgcccgggctttgcccgggcggcctcagtgagcgagcgagcgcgcag

SEQ ID NO: 220 - DNA, 2932 bp, synthetic construct
  misc_feature 1..2932: note = Description of Artificial Sequence: Syntheticpolynucleotide
  source 1..2932: mol_type = other DNA
ctgcgcgctcgctcgctcactgaggccgcccgggcgtcgggcgacctttggtcgcccggcctcagtgagcgagcgagcgcgcagagagggagtggccaactccatcactaggggttcctgcggccgcacgcgtgacattgattattgactagttattaatagtaatcaattacggggtcattagttcatagcccatatatggagttccgcgttacataacttacggtaaatggcccgcctggctgaccgcccaacgacccccgcccattgacgtcaataatgacgtatgttcccatagtaacgccaatagggactttccattgacgtcaatgggtggactatttacggtaaactgcccacttggcagtacatcaagtgtatcatatgccaagtacgccccctattgacgtcaatgacggtaaatggcccgcctggcattatgcccagtacatgaccttatgggactttcctacttggcagtacatctacgtattagtcatcgctattaccatgggtcgaggtgagccccacgttctgcttcactctccccatctcccccccctccccacccccaattttgtatttatttattttttaattattttgtgcagcgatgggggcggggggggggggggcgcgcgccaggcggggcggggcggggcgaggggcggggcggggcgaggcggagaggtgcggcggcagccaatcagagcggcgcgctccgaaagtttccttttatggcgaggcggcggcggcggcggccctataaaaagcgaagcgcgcggcgggcgggagtcgctgcgttgccttcgccccgtgccccgctccgcgccgcctcgcgccgcccgccccggctctgactgaccgcgttactcccacaggtgagcgggcgggacggcccttctcctccgggctgtaattagcgcttggtttaatgacggctcgtttcttttctgtggctgcgtgaaagccttaaagggctccgggagggccctttgtgcgggggggagcggctcggggggtgcgtgcgtgtgtgtgtgcgtggggagcgccgcgtgcggcccgcgctgcccggcggctgtgagcgctgcgggcgcggcgcggggctttgtgcgctccgcgtgtgcgcgaggggagcgcggccgggggcggtgccccgcggtgcgggggggctgcgaggggaacaaaggctgcgtgcggggtgtgtgcgtgggggggtgagcagggggtgtgggcgcggcggtcgggctgtaacccccccctgcacccccctccccgagttgctgagcacggcccggcttcgggtgcggggctccgtgcggggcgtggcgcggggctcgccgtgccgggcggggggtggcggcaggtgggggtgccgggcggggcggggccgcctcgggccggggagggctcgggggaggggcgcggcggcccccggagcgccggcggaaacagattggaaatgatttgttttgagcgggggttgagaatcctgatggagcgggtttgtcataaaccccgctccctcaggattcccaacctcctctcatttgctatattcaattaagtaatctagagcctctgctaaccatgttcatgccttcttctttttcctacagctcctgggcaacgtgctggttattgtgaccggtcgctagccaccatggtgagcaagggcgaggagctgttcaccggggtggtgcccatcctggtcgagctggacggcgacgtaaacggccacaagttcagcgtgtccggcgagggcgagggcgatgccacctacggcaagctgaccctgaagttcatctgcaccaccggcaagctgcccgtgccctggcccaccctcgtgaccaccctgacctacggcgtgcagtgcttcagccgctaccccgaccacatgaagcagcacgacttcttcaagtccgccatgcccgaaggctacgtccaggagcgcaccatcttcttcaaggacgacggcaactacaagacccgcgccgaggtgaagttcgagggcgacaccctggtgaaccgcatcgagctgaagggcatcgacttcaaggaggacggcaacatcctggggcacaagctggagtacaactacaacagccacaacgtctatatcatggccgacaagcagaagaacggcatcaaggtgaacttcaagatccgccacaacatcgaggacggcagcgtgcagctcgccgaccactaccagcagaacacccccatcggcgacggccccgtgctgctgcccgacaaccactacctgagcacccagtccgccctgagcaaagaccccaacgagaagcgcgatcacatggtcctgctggagttcgtgaccgccgccgggatcactctcggcatggacgagctgtacaagtaacctgcaggcgccggcggaaacagattggaaatgatttgttttgagcgggggttgagaatcctgatggagcgggtttgtcataaaccccgctccctcaggattcccaacctcctctcatttgctatattcaattaagtaagagctcgctgatcagcctcgactgtgccttctagttgccagccatctgttgtttgcccctcccccgtgccttccttgaccctggaaggtgccactcccactgtcctttcctaataaaatgaggaaattgcatcgcattgtctgagtaggtgtcattctattctggggggtggggtggggcaggacagcaagggggaggattgggaagacaatagcaggcatgctggggatgcggtgggctctatggaagcttgaattcagctgacgtgcctcggaccgctaggaacccctagtgatggagttggccactccctctctgcgcgctcgctcgctcactgaggccgggcgaccaaaggtcgcccgacgcccgggctttgcccgggcggcctcagtgagcgagcgagcgcgcag

SEQ ID NO: 221 - DNA, 2890 bp, synthetic construct
  misc_feature 1..2890: note = Description of Artificial Sequence: Syntheticpolynucleotide
  source 1..2890: mol_type = other DNA
ctgcgcgctcgctcgctcactgaggccgcccgggcgtcgggcgacctttggtcgcccggcctcagtgagcgagcgagcgcgcagagagggagtggccaactccatcactaggggttcctgcggccgcacgcgtgacattgattattgactagttattaatagtaatcaattacggggtcattagttcatagcccatatatggagttccgcgttacataacttacggtaaatggcccgcctggctgaccgcccaacgacccccgcccattgacgtcaataatgacgtatgttcccatagtaacgccaatagggactttccattgacgtcaatgggtggactatttacggtaaactgcccacttggcagtacatcaagtgtatcatatgccaagtacgccccctattgacgtcaatgacggtaaatggcccgcctggcattatgcccagtacatgaccttatgggactttcctacttggcagtacatctacgtattagtcatcgctattaccatgggtcgaggtgagccccacgttctgcttcactctccccatctcccccccctccccacccccaattttgtatttatttattttttaattattttgtgcagcgatgggggcggggggggggggggcgcgcgccaggcggggcggggcggggcgaggggcggggcggggcgaggcggagaggtgcggcggcagccaatcagagcggcgcgctccgaaagtttccttttatggcgaggcggcggcggcggcggccctataaaaagcgaagcgcgcggcgggcgggagtcgctgcgttgccttcgccccgtgccccgctccgcgccgcctcgcgccgcccgccccggctctgactgaccgcgttactcccacaggtgagcgggcgggacggcccttctcctccgggctgtaattagcgcttggtttaatgacggctcgtttcttttctgtggctgcgtgaaagccttaaagggctccgggagggccctttgtgcgggggggagcggctcggggggtgcgtgcgtgtgtgtgtgcgtggggagcgccgcgtgcggcccgcgctgcccggcggctgtgagcgctgcgggcgcggcgcggggctttgtgcgctccgcgtgtgcgcgaggggagcgcggccgggggcggtgccccgcggtgcgggggggctgcgaggggaacaaaggctgcgtgcggggtgtgtgcgtgggggggtgagcagggggtgtgggcgcggcggtcgggctgtaacccccccctgcacccccctccccgagttgctgagcacggcccggcttcgggtgcggggctccgtgcggggcgtggcgcggggctcgccgtgccgggcggggggtggcggcaggtgggggtgccgggcggggcggggccgcctcgggccggggagggctcgggggaggggcgcggcggcccccggagcgccggcgtgactgccagggcacttgggaatggcaaggttgagaatcctgatggagcggattccatcaggattctcagtcttgctatacccagaaaacgtgccaggaagatctagagcctctgctaaccatgttcatgccttcttctttttcctacagctcctgggcaacgtgctggttattgtgaccggtcgctagccaccatggtgagcaagggcgaggagctgttcaccggggtggtgcccatcctggtcgagctggacggcgacgtaaacggccacaagttcagcgtgtccggcgagggcgagggcgatgccacctacggcaagctgaccctgaagttcatctgcaccaccggcaagctgcccgtgccctggcccaccctcgtgaccaccctgacctacggcgtgcagtgcttcagccgctaccccgaccacatgaagcagcacgacttcttcaagtccgccatgcccgaaggctacgtccaggagcgcaccatcttcttcaaggacgacggcaactacaagacccgcgccgaggtgaagttcgagggcgacaccctggtgaaccgcatcgagctgaagggcatcgacttcaaggaggacggcaacatcctggggcacaagctggagtacaactacaacagccacaacgtctatatcatggccgacaagcagaagaacggcatcaaggtgaacttcaagatccgccacaacatcgaggacggcagcgtgcagctcgccgaccactaccagcagaacacccccatcggcgacggccccgtgctgctgcccgacaaccactacctgagcacccagtccgccctgagcaaagaccccaacgagaagcgcgatcacatggtcctgctggagttcgtgaccgccgccgggatcactctcggcatggacgagctgtacaagtaacctgcaggcgccggcgtgactgccagggcacttgggaatggcaaggttgagaatcctgatggagcggattccatcaggattctcagtcttgctatacccagaaaacgtgccaggaagagagctcgctgatcagcctcgactgtgccttctagttgccagccatctgttgtttgcccctcccccgtgccttccttgaccctggaaggtgccactcccactgtcctttcctaataaaatgaggaaattgcatcgcattgtctgagtaggtgtcattctattctggggggtggggtggggcaggacagcaagggggaggattgggaagacaatagcaggcatgctggggatgcggtgggctctatggaagcttgaattcagctgacgtgcctcggaccgctaggaacccctagtgatggagttggccactccctctctgcgcgctcgctcgctcactgaggccgggcgaccaaaggtcgcccgacgcccgggctttgcccgggcggcctcagtgagcgagcgagcgcgcag

SEQ ID NO: 222 - DNA, 2696 bp, synthetic construct
  misc_feature 1..2696: note = Description of Artificial Sequence: Syntheticpolynucleotide
  source 1..2696: mol_type = other DNA
ctgcgcgctcgctcgctcactgaggccgcccgggcgtcgggcgacctttggtcgcccggcctcagtgagcgagcgagcgcgcagagagggagtggccaactccatcactaggggttcctgcggccgcacgcgtgacattgattattgactagttattaatagtaatcaattacggggtcattagttcatagcccatatatggagttccgcgttacataacttacggtaaatggcccgcctggctgaccgcccaacgacccccgcccattgacgtcaataatgacgtatgttcccatagtaacgccaatagggactttccattgacgtcaatgggtggactatttacggtaaactgcccacttggcagtacatcaagtgtatcatatgccaagtacgccccctattgacgtcaatgacggtaaatggcccgcctggcattatgcccagtacatgaccttatgggactttcctacttggcagtacatctacgtattagtcatcgctattaccatgggtcgaggtgagccccacgttctgcttcactctccccatctcccccccctccccacccccaattttgtatttatttattttttaattattttgtgcagcgatgggggcggggggggggggggcgcgcgccaggcggggcggggcggggcgaggggcggggcggggcgaggcggagaggtgcggcggcagccaatcagagcggcgcgctccgaaagtttccttttatggcgaggcggcggcggcggcggccctataaaaagcgaagcgcgcggcgggcgggagtcgctgcgttgccttcgccccgtgccccgctccgcgccgcctcgcgccgcccgccccggctctgactgaccgcgttactcccacaggtgagcgggcgggacggcccttctcctccgggctgtaattagcgcttggtttaatgacggctcgtttcttttctgtggctgcgtgaaagccttaaagggctccgggagggccctttgtgcgggggggagcggctcggggggtgcgtgcgtgtgtgtgtgcgtggggagcgccgcgtgcggcccgcgctgcccggcggctgtgagcgctgcgggcgcggcgcggggctttgtgcgctccgcgtgtgcgcgaggggagcgcggccgggggcggtgccccgcggtgcgggggggctgcgaggggaacaaaggctgcgtgcggggtgtgtgcgtgggggggtgagcagggggtgtgggcgcggcggtcgggctgtaacccccccctgcacccccctccccgagttgctgagcacggcccggcttcgggtgcggggctccgtgcggggcgtggcgcggggctcgccgtgccgggcggggggtggcggcaggtgggggtgccgggcggggcggggccgcctcgggccggggagggctcgggggaggggcgcggcggcccccggagcgccggcgnnnnntctagagcctctgctaaccatgttcatgccttcttctttttcctacagctcctgggcaacgtgctggttattgtgaccggtcgctagccaccatggtgagcaagggcgaggagctgttcaccggggtggtgcccatcctggtcgagctggacggcgacgtaaacggccacaagttcagcgtgtccggcgagggcgagggcgatgccacctacggcaagctgaccctgaagttcatctgcaccaccggcaagctgcccgtgccctggcccaccctcgtgaccaccctgacctacggcgtgcagtgcttcagccgctaccccgaccacatgaagcagcacgacttcttcaagtccgccatgcccgaaggctacgtccaggagcgcaccatcttcttcaaggacgacggcaactacaagacccgcgccgaggtgaagttcgagggcgacaccctggtgaaccgcatcgagctgaagggcatcgacttcaaggaggacggcaacatcctggggcacaagctggagtacaactacaacagccacaacgtctatatcatggccgacaagcagaagaacggcatcaaggtgaacttcaagatccgccacaacatcgaggacggcagcgtgcagctcgccgaccactaccagcagaacacccccatcggcgacggccccgtgctgctgcccgacaaccactacctgagcacccagtccgccctgagcaaagaccccaacgagaagcgcgatcacatggtcctgctggagttcgtgaccgccgccgggatcactctcggcatggacgagctgtacaagtaacctgcaggcgccggcgnnnnngagctcgctgatcagcctcgactgtgccttctagttgccagccatctgttgtttgcccctcccccgtgccttccttgaccctggaaggtgccactcccactgtcctttcctaataaaatgaggaaattgcatcgcattgtctgagtaggtgtcattctattctggggggtggggtggggcaggacagcaagggggaggattgggaagacaatagcaggcatgctggggatgcggtgggctctatggaagcttgaattcagctgacgtgcctcggaccgctaggaacccctagtgatggagttggccactccctctctgcgcgctcgctcgctcactgaggccgggcgaccaaaggtcgcccgacgcccgggctttgcccgggcggcctcagtgagcgagcgagcgcgcag

SEQ ID NO: 223 - DNA, 2675 bp, synthetic construct
  misc_feature 1..2675: note = Description of Artificial Sequence: Syntheticpolynucleotide
  source 1..2675: mol_type = other DNA
ctgcgcgctcgctcgctcactgaggccgcccgggcgtcgggcgacctttggtcgcccggcctcagtgagcgagcgagcgcgcagagagggagtggccaactccatcactaggggttcctgcggccgcacgcgtgacattgattattgactagttattaatagtaatcaattacggggtcattagttcatagcccatatatggagttccgcgttacataacttacggtaaatggcccgcctggctgaccgcccaacgacccccgcccattgacgtcaataatgacgtatgttcccatagtaacgccaatagggactttccattgacgtcaatgggtggactatttacggtaaactgcccacttggcagtacatcaagtgtatcatatgccaagtacgccccctattgacgtcaatgacggtaaatggcccgcctggcattatgcccagtacatgaccttatgggactttcctacttggcagtacatctacgtattagtcatcgctattaccatgggtcgaggtgagccccacgttctgcttcactctccccatctcccccccctccccacccccaattttgtatttatttattttttaattattttgtgcagcgatgggggcggggggggggggggcgcgcgccaggcggggcggggcggggcgaggggcggggcggggcgaggcggagaggtgcggcggcagccaatcagagcggcgcgctccgaaagtttccttttatggcgaggcggcggcggcggcggccctataaaaagcgaagcgcgcggcgggcgggagtcgctgcgttgccttcgccccgtgccccgctccgcgccgcctcgcgccgcccgccccggctctgactgaccgcgttactcccacaggtgagcgggcgggacggcccttctcctccgggctgtaattagcgcttggtttaatgacggctcgtttcttttctgtggctgcgtgaaagccttaaagggctccgggagggccctttgtgcgggggggagcggctcggggggtgcgtgcgtgtgtgtgtgcgtggggagcgccgcgtgcggcccgcgctgcccggcggctgtgagcgctgcgggcgcggcgcggggctttgtgcgctccgcgtgtgcgcgaggggagcgcggccgggggcggtgccccgcggtgcgggggggctgcgaggggaacaaaggctgcgtgcggggtgtgtgcgtgggggggtgagcagggggtgtgggcgcggcggtcgggctgtaacccccccctgcacccccctccccgagttgctgagcacggcccggcttcgggtgcggggctccgtgcggggcgtggcgcggggctcgccgtgccgggcggggggtggcggcaggtgggggtgccgggcggggcggggccgcctcgggccggggagggctcgggggaggggcgcggcggcccccggagcgccggcgnnnnntctagagcctctgctaaccatgttcatgccttcttctttttcctacagctcctgggcaacgtgctggttattgtgaccggtcgctagccaccatggtgagcaagggcgaggagctgttcaccggggtggtgcccatcctggtcgagctggacggcgacgtaaacggccacaagttcagcgtgtccggcgagggcgagggcgatgccacctacggcaagctgaccctgaagttcatctgcaccaccggcaagctgcccgtgccctggcccaccctcgtgaccaccctgacctacggcgtgcagtgcttcagccgctaccccgaccacatgaagcagcacgacttcttcaagtccgccatgcccgaaggctacgtccaggagcgcaccatcttcttcaaggacgacggcaactacaagacccgcgccgaggtgaagttcgagggcgacaccctggtgaaccgcatcgagctgaagggcatcgacttcaaggaggacggcaacatcctggggcacaagctggagtacaactacaacagccacaacgtctatatcatggccgacaagcagaagaacggcatcaaggtgaacttcaagatccgccacaacatcgaggacggcagcgtgcagctcgccgaccactaccagcagaacacccccatcggcgacggccccgtgctgctgcccgacaaccactacctgagcacccagtccgccctgagcaaagaccccaacgagaagcgcgatcacatggtcctgctggagttcgtgaccgccgccgggatcactctcggcatggacgagctgtacaagtaagagctcgctgatcagcctcgactgtgccttctagttgccagccatctgttgtttgcccctcccccgtgccttccttgaccctggaaggtgccactcccactgtcctttcctaataaaatgaggaaattgcatcgcattgtctgagtaggtgtcattctattctggggggtggggtggggcaggacagcaagggggaggattgggaagacaatagcaggcatgctggggatgcggtgggctctatggaagcttgaattcagctgacgtgcctcggaccgctaggaacccctagtgatggagttggccactccctctctgcgcgctcgctcgctcactgaggccgggcgaccaaaggtcgcccgacgcccgggctttgcccgggcggcctcagtgagcgagcgagcgcgcag

SEQ ID NO: 224 - DNA, 2983 bp, synthetic construct
  misc_feature 1..2983: note = Description of Artificial Sequence: Syntheticpolynucleotide
  source 1..2983: mol_type = other DNA
ctgcgcgctcgctcgctcactgaggccgcccgggcgtcgggcgacctttggtcgcccggcctcagtgagcgagcgagcgcgcagagagggagtggccaactccatcactaggggttcctgcggccgcacgcgtgacattgattattgactagttattaatagtaatcaattacggggtcattagttcatagcccatatatggagttccgcgttacataacttacggtaaatggcccgcctggctgaccgcccaacgacccccgcccattgacgtcaataatgacgtatgttcccatagtaacgccaatagggactttccattgacgtcaatgggtggactatttacggtaaactgcccacttggcagtacatcaagtgtatcatatgccaagtacgccccctattgacgtcaatgacggtaaatggcccgcctggcattatgcccagtacatgaccttatgggactttcctacttggcagtacatctacgtattagtcatcgctattaccatgggtcgaggtgagccccacgttctgcttcactctccccatctcccccccctccccacccccaattttgtatttatttattttttaattattttgtgcagcgatgggggcggggggggggggggcgcgcgccaggcggggcggggcggggcgaggggcggggcggggcgaggcggagaggtgcggcggcagccaatcagagcggcgcgctccgaaagtttccttttatggcgaggcggcggcggcggcggccctataaaaagcgaagcgcgcggcgggcgggagtcgctgcgttgccttcgccccgtgccccgctccgcgccgcctcgcgccgcccgccccggctctgactgaccgcgttactcccacaggtgagcgggcgggacggcccttctcctccgggctgtaattagcgcttggtttaatgacggctcgtttcttttctgtggctgcgtgaaagccttaaagggctccgggagggccctttgtgcgggggggagcggctcggggggtgcgtgcgtgtgtgtgtgcgtggggagcgccgcgtgcggcccgcgctgcccggcggctgtgagcgctgcgggcgcggcgcggggctttgtgcgctccgcgtgtgcgcgaggggagcgcggccgggggcggtgccccgcggtgcgggggggctgcgaggggaacaaaggctgcgtgcggggtgtgtgcgtgggggggtgagcagggggtgtgggcgcggcggtcgggctgtaacccccccctgcacccccctccccgagttgctgagcacggcccggcttcgggtgcggggctccgtgcggggcgtggcgcggggctcgccgtgccgggcggggggtggcggcaggtgggggtgccgggcggggcggggccgcctcgggccggggagggctcgggggaggggcgcggcggcccccggagcgccggcggctgtcgaggcgcggcgagccgcagccattgccttttatggtaatcgtgcgagagggcgcagggacttcctttgtcccaaatctgtgcggagccgaaatctgggaggcgccgccgcaccccctctagcgggcgcggggcgaagcggtgcggcgccggcaggaaggaaatgggcggggagggccttcgtgcgtcgccgcgccgccgtccccttctccctctccagcctcggggctgtccgcggggggacggctgccttcgggggggacggggcagggcggggttcggcttctggcgtgtgaccggcggctctagagcctctgctaaccatgttcatgccttcttctttttcctacagctcctgggcaacgtgctggttattgtgaccggtcgctagccaccatggtgagcaagggcgaggagctgttcaccggggtggtgcccatcctggtcgagctggacggcgacgtaaacggccacaagttcagcgtgtccggcgagggcgagggcgatgccacctacggcaagctgaccctgaagttcatctgcaccaccggcaagctgcccgtgccctggcccaccctcgtgaccaccctgacctacggcgtgcagtgcttcagccgctaccccgaccacatgaagcagcacgacttcttcaagtccgccatgcccgaaggctacgtccaggagcgcaccatcttcttcaaggacgacggcaactacaagacccgcgccgaggtgaagttcgagggcgacaccctggtgaaccgcatcgagctgaagggcatcgacttcaaggaggacggcaacatcctggggcacaagctggagtacaactacaacagccacaacgtctatatcatggccgacaagcagaagaacggcatcaaggtgaacttcaagatccgccacaacatcgaggacggcagcgtgcagctcgccgaccactaccagcagaacacccccatcggcgacggccccgtgctgctgcccgacaaccactacctgagcacccagtccgccctgagcaaagaccccaacgagaagcgcgatcacatggtcctgctggagttcgtgaccgccgccgggatcactctcggcatggacgagctgtacaagtaannnnngagctcgctgatcagcctcgactgtgccttctagttgccagccatctgttgtttgcccctcccccgtgccttccttgaccctggaaggtgccactcccactgtcctttcctaataaaatgaggaaattgcatcgcattgtctgagtaggtgtcattctattctggggggtggggtggggcaggacagcaagggggaggattgggaagacaatagcaggcatgctggggatgcggtgggctctatggaagcttgaattcagctgacgtgcctcggaccgctaggaacccctagtgatggagttggccactccctctctgcgcgctcgctcgctcactgaggccgggcgaccaaaggtcgcccgacgcccgggctttgcccgggcggcctcagtgagcgagcgagcgcgcag

SEQ ID NO: 225 - DNA, 2963 bp, synthetic construct
  misc_feature 1..2963: note = Description of Artificial Sequence: Syntheticpolynucleotide
  source 1..2963: mol_type = other DNA
cctgcaggcagctgcgcgctcgctcgctcactgaggccgcccgggcgtcgggcgacctttggtcgcccggcctcagtgagcgagcgagcgcgcagagagggagtggccaactccatcactaggggttcctgcggccgcacgcgtgacattgattattgactagttattaatagtaatcaattacggggtcattagttcatagcccatatatggagttccgcgttacataacttacggtaaatggcccgcctggctgaccgcccaacgacccccgcccattgacgtcaataatgacgtatgttcccatagtaacgccaatagggactttccattgacgtcaatgggtggactatttacggtaaactgcccacttggcagtacatcaagtgtatcatatgccaagtacgccccctattgacgtcaatgacggtaaatggcccgcctggcattatgcccagtacatgaccttatgggactttcctacttggcagtacatctacgtattagtcatcgctattaccatgggtcgaggtgagccccacgttctgcttcactctccccatctcccccccctccccacccccaattttgtatttatttattttttaattattttgtgcagcgatgggggcggggggggggggggcgcgcgccaggcggggcggggcggggcgaggggcggggcggggcgaggcggagaggtgcggcggcagccaatcagagcggcgcgctccgaaagtttccttttatggcgaggcggcggcggcggcggccctataaaaagcgaagcgcgcggcgggcgggagtcgctgcgttgccttcgccccgtgccccgctccgcgccgcctcgcgccgcccgccccggctctgactgaccgcgttactcccacaggtgagcgggcgggacggcccttctcctccgggctgtaattagcgcttggtttaatgacggctcgtttcttttctgtggctgcgtgaaagccttaaagggctccgggagggccctttgtgcgggggggagcggctcggggggtgcgtgcgtgtgtgtgtgcgtggggagcgccgcgtgcggcccgcgctgcccggcggctgtgagcgctgcgggcgcggcgcggggctttgtgcgctccgcgtgtgcgcgaggggagcgcggccgggggcggtgccccgcggtgcgggggggctgcgaggggaacaaaggctgcgtgcggggtgtgtgcgtgggggggtgagcagggggtgtgggcgcggcggtcgggctgtaacccccccctgcacccccctccccgagttgctgagcacggcccggcttcgggtgcggggctccgtgcggggcgtggcgcggggctcgccgtgccgggcggggggtggcggcaggtgggggtgccgggcggggcggggccgcctcgggccggggagggctcgggggaggggcgcggcggcccccggagcgccggcgtcctctgagtgctgaaggcttgctgtaggctgtatgctgttgagaatcctgatggagcgggtttttgcctccaactgacccgctcataggattctcaacagtgtatgatgcctgttactagcattcacatggatctagagcctctgctaaccatgttcatgccttcttctttttcctacagctcctgggcaacgtgctggttattgtgaccggtcgctagccaccatggtgagcaagggcgaggagctgttcaccggggtggtgcccatcctggtcgagctggacggcgacgtaaacggccacaagttcagcgtgtccggcgagggcgagggcgatgccacctacggcaagctgaccctgaagttcatctgcaccaccggcaagctgcccgtgccctggcccaccctcgtgaccaccctgacctacggcgtgcagtgcttcagccgctaccccgaccacatgaagcagcacgacttcttcaagtccgccatgcccgaaggctacgtccaggagcgcaccatcttcttcaaggacgacggcaactacaagacccgcgccgaggtgaagttcgagggcgacaccctggtgaaccgcatcgagctgaagggcatcgacttcaaggaggacggcaacatcctggggcacaagctggagtacaactacaacagccacaacgtctatatcatggccgacaagcagaagaacggcatcaaggtgaacttcaagatccgccacaacatcgaggacggcagcgtgcagctcgccgaccactaccagcagaacacccccatcggcgacggccccgtgctgctgcccgacaaccactacctgagcacccagtccgccctgagcaaagaccccaacgagaagcgcgatcacatggtcctgctggagttcgtgaccgccgccgggatcactctcggcatggacgagctgtacaagtaacctgcaggcgccggcgtcctctgagtgctgaaggcttgctgtaggctgtatgctgttgagaatcctgatggagcgggtttttgcctccaactgacccgctcataggattctcaacagtgtatgatgcctgttactagcattcacatggagagctcgctgatcagcctcgactgtgccttctagttgccagccatctgttgtttgcccctcccccgtgccttccttgaccctggaaggtgccactcccactgtcctttcctaataaaatgaggaaattgcatcgcattgtctgagtaggtgtcattctattctggggggtggggtggggcaggacagcaagggggaggattgggaagacaatagcaggcatgctggggatgcggtgggctctatggaagcttgaattcagctgacgtgcctcggaccgctaggaacccctagtgatggagttggccactccctctctgcgcgctcgctcgctcactgaggccgggcgaccaaaggtcgcccgacgcccgggctttgcccgggcggcctcagtgagcgagcgagcgcgcag

SEQ ID NO: 226 - DNA, 2814 bp, synthetic construct
  misc_feature 1..2814: note = Description of Artificial Sequence: Syntheticpolynucleotide
  source 1..2814: mol_type = other DNA
cctgcaggcagctgcgcgctcgctcgctcactgaggccgcccgggcgtcgggcgacctttggtcgcccggcctcagtgagcgagcgagcgcgcagagagggagtggccaactccatcactaggggttcctgcggccgcacgcgtgacattgattattgactagttattaatagtaatcaattacggggtcattagttcatagcccatatatggagttccgcgttacataacttacggtaaatggcccgcctggctgaccgcccaacgacccccgcccattgacgtcaataatgacgtatgttcccatagtaacgccaatagggactttccattgacgtcaatgggtggactatttacggtaaactgcccacttggcagtacatcaagtgtatcatatgccaagtacgccccctattgacgtcaatgacggtaaatggcccgcctggcattatgcccagtacatgaccttatgggactttcctacttggcagtacatctacgtattagtcatcgctattaccatgggtcgaggtgagccccacgttctgcttcactctccccatctcccccccctccccacccccaattttgtatttatttattttttaattattttgtgcagcgatgggggcggggggggggggggcgcgcgccaggcggggcggggcggggcgaggggcggggcggggcgaggcggagaggtgcggcggcagccaatcagagcggcgcgctccgaaagtttccttttatggcgaggcggcggcggcggcggccctataaaaagcgaagcgcgcggcgggcgggagtcgctgcgttgccttcgccccgtgccccgctccgcgccgcctcgcgccgcccgccccggctctgactgaccgcgttactcccacaggtgagcgggcgggacggcccttctcctccgggctgtaattagcgcttggtttaatgacggctcgtttcttttctgtggctgcgtgaaagccttaaagggctccgggagggccctttgtgcgggggggagcggctcggggggtgcgtgcgtgtgtgtgtgcgtggggagcgccgcgtgcggcccgcgctgcccggcggctgtgagcgctgcgggcgcggcgcggggctttgtgcgctccgcgtgtgcgcgaggggagcgcggccgggggcggtgccccgcggtgcgggggggctgcgaggggaacaaaggctgcgtgcggggtgtgtgcgtgggggggtgagcagggggtgtgggcgcggcggtcgggctgtaacccccccctgcacccccctccccgagttgctgagcacggcccggcttcgggtgcggggctccgtgcggggcgtggcgcggggctcgccgtgccgggcggggggtggcggcaggtgggggtgccgggcggggcggggccgcctcgggccggggagggctcgggggaggggcgcggcggcccccggagcgccggcgtcctctgagtgctgaaggcttgctgtaggctgtatgctgttgagaatcctgatggagcgggtttttgcctccaactgacccgctcataggattctcaacagtgtatgatgcctgttactagcattcacatggatctagagcctctgctaaccatgttcatgccttcttctttttcctacagctcctgggcaacgtgctggttattgtgaccggtcgctagccaccatggtgagcaagggcgaggagctgttcaccggggtggtgcccatcctggtcgagctggacggcgacgtaaacggccacaagttcagcgtgtccggcgagggcgagggcgatgccacctacggcaagctgaccctgaagttcatctgcaccaccggcaagctgcccgtgccctggcccaccctcgtgaccaccctgacctacggcgtgcagtgcttcagccgctaccccgaccacatgaagcagcacgacttcttcaagtccgccatgcccgaaggctacgtccaggagcgcaccatcttcttcaaggacgacggcaactacaagacccgcgccgaggtgaagttcgagggcgacaccctggtgaaccgcatcgagctgaagggcatcgacttcaaggaggacggcaacatcctggggcacaagctggagtacaactacaacagccacaacgtctatatcatggccgacaagcagaagaacggcatcaaggtgaacttcaagatccgccacaacatcgaggacggcagcgtgcagctcgccgaccactaccagcagaacacccccatcggcgacggccccgtgctgctgcccgacaaccactacctgagcacccagtccgccctgagcaaagaccccaacgagaagcgcgatcacatggtcctgctggagttcgtgaccgccgccgggatcactctcggcatggacgagctgtacaagtaagagctcgctgatcagcctcgactgtgccttctagttgccagccatctgttgtttgcccctcccccgtgccttccttgaccctggaaggtgccactcccactgtcctttcctaataaaatgaggaaattgcatcgcattgtctgagtaggtgtcattctattctggggggtggggtggggcaggacagcaagggggaggattgggaagacaatagcaggcatgctggggatgcggtgggctctatggaagcttgaattcagctgacgtgcctcggaccgctaggaacccctagtgatggagttggccactccctctctgcgcgctcgctcgctcactgaggccgggcgaccaaaggtcgcccgacgcccgggctttgcccgggcggcctcagtgagcgagcgagcgcgcag

SEQ ID NO: 227 - DNA, 3138 bp, synthetic construct
  misc_feature 1..3138: note = Description of Artificial Sequence: Syntheticpolynucleotide
  source 1..3138: mol_type = other DNA
cctgcaggcagctgcgcgctcgctcgctcactgaggccgcccgggcgtcgggcgacctttggtcgcccggcctcagtgagcgagcgagcgcgcagagagggagtggccaactccatcactaggggttcctgcggccgcacgcgtgacattgattattgactagttattaatagtaatcaattacggggtcattagttcatagcccatatatggagttccgcgttacataacttacggtaaatggcccgcctggctgaccgcccaacgacccccgcccattgacgtcaataatgacgtatgttcccatagtaacgccaatagggactttccattgacgtcaatgggtggactatttacggtaaactgcccacttggcagtacatcaagtgtatcatatgccaagtacgccccctattgacgtcaatgacggtaaatggcccgcctggcattatgcccagtacatgaccttatgggactttcctacttggcagtacatctacgtattagtcatcgctattaccatgggtcgaggtgagccccacgttctgcttcactctccccatctcccccccctccccacccccaattttgtatttatttattttttaattattttgtgcagcgatgggggcggggggggggggggcgcgcgccaggcggggcggggcggggcgaggggcggggcggggcgaggcggagaggtgcggcggcagccaatcagagcggcgcgctccgaaagtttccttttatggcgaggcggcggcggcggcggccctataaaaagcgaagcgcgcggcgggcgggagtcgctgcgttgccttcgccccgtgccccgctccgcgccgcctcgcgccgcccgccccggctctgactgaccgcgttactcccacaggtgagcgggcgggacggcccttctcctccgggctgtaattagcgcttggtttaatgacggctcgtttcttttctgtggctgcgtgaaagccttaaagggctccgggagggccctttgtgcgggggggagcggctcggggggtgcgtgcgtgtgtgtgtgcgtggggagcgccgcgtgcggcccgcgctgcccggcggctgtgagcgctgcgggcgcggcgcggggctttgtgcgctccgcgtgtgcgcgaggggagcgcggccgggggcggtgccccgcggtgcgggggggctgcgaggggaacaaaggctgcgtgcggggtgtgtgcgtgggggggtgagcagggggtgtgggcgcggcggtcgggctgtaacccccccctgcacccccctccccgagttgctgagcacggcccggcttcgggtgcggggctccgtgcggggcgtggcgcggggctcgccgtgccgggcggggggtggcggcaggtgggggtgccgggcggggcggggccgcctcgggccggggagggctcgggggaggggcgcggcggcccccggagcgccggcggctgtcgaggcgcggcgagccgcagccattgccttttatggtaatcgtgcgagagggcgcagggacttcctttgtcccaaatctgtgcggagccgaaatctgggaggcgccgccgcaccccctctagcgggcgcggggcgaagcggtgcggcgccggcaggaaggaaatgggcggggagggccttcgtgcgtcgccgcgccgccgtccccttctccctctccagcctcggggctgtccgcggggggacggctgccttcgggggggacggggcagggcggggttcggcttctggcgtgtgaccggcggctctagagcctctgctaaccatgttcatgccttcttctttttcctacagctcctgggcaacgtgctggttattgtgaccggtcgctagccaccatggtgagcaagggcgaggagctgttcaccggggtggtgcccatcctggtcgagctggacggcgacgtaaacggccacaagttcagcgtgtccggcgagggcgagggcgatgccacctacggcaagctgaccctgaagttcatctgcaccaccggcaagctgcccgtgccctggcccaccctcgtgaccaccctgacctacggcgtgcagtgcttcagccgctaccccgaccacatgaagcagcacgacttcttcaagtccgccatgcccgaaggctacgtccaggagcgcaccatcttcttcaaggacgacggcaactacaagacccgcgccgaggtgaagttcgagggcgacaccctggtgaaccgcatcgagctgaagggcatcgacttcaaggaggacggcaacatcctggggcacaagctggagtacaactacaacagccacaacgtctatatcatggccgacaagcagaagaacggcatcaaggtgaacttcaagatccgccacaacatcgaggacggcagcgtgcagctcgccgaccactaccagcagaacacccccatcggcgacggccccgtgctgctgcccgacaaccactacctgagcacccagtccgccctgagcaaagaccccaacgagaagcgcgatcacatggtcctgctggagttcgtgaccgccgccgggatcactctcggcatggacgagctgtacaagtaacctgcaggcgccggcgtcctctgagtgctgaaggcttgctgtaggctgtatgctgttgagaatcctgatggagcgggtttttgcctccaactgacccgctcataggattctcaacagtgtatgatgcctgttactagcattcacatggagagctcgctgatcagcctcgactgtgccttctagttgccagccatctgttgtttgcccctcccccgtgccttccttgaccctggaaggtgccactcccactgtcctttcctaataaaatgaggaaattgcatcgcattgtctgagtaggtgtcattctattctggggggtggggtggggcaggacagcaagggggaggattgggaagacaatagcaggcatgctggggatgcggtgggctctatggaagcttgaattcagctgacgtgcctcggaccgctaggaacccctagtgatggagttggccactccctctctgcgcgctcgctcgctcactgaggccgggcgaccaaaggtcgcccgacgcccgggctttgcccgggcggcctcagtgagcgagcgagcgcgcag

SEQ ID NO: 228 - DNA, 2963 bp, synthetic construct
  misc_feature 1..2963: note = Description of Artificial Sequence: Syntheticpolynucleotide
  source 1..2963: mol_type = other DNA
cctgcaggcagctgcgcgctcgctcgctcactgaggccgcccgggcgtcgggcgacctttggtcgcccggcctcagtgagcgagcgagcgcgcagagagggagtggccaactccatcactaggggttcctgcggccgcacgcgtgacattgattattgactagttattaatagtaatcaattacggggtcattagttcatagcccatatatggagttccgcgttacataacttacggtaaatggcccgcctggctgaccgcccaacgacccccgcccattgacgtcaataatgacgtatgttcccatagtaacgccaatagggactttccattgacgtcaatgggtggactatttacggtaaactgcccacttggcagtacatcaagtgtatcatatgccaagtacgccccctattgacgtcaatgacggtaaatggcccgcctggcattatgcccagtacatgaccttatgggactttcctacttggcagtacatctacgtattagtcatcgctattaccatgggtcgaggtgagccccacgttctgcttcactctccccatctcccccccctccccacccccaattttgtatttatttattttttaattattttgtgcagcgatgggggcggggggggggggggcgcgcgccaggcggggcggggcggggcgaggggcggggcggggcgaggcggagaggtgcggcggcagccaatcagagcggcgcgctccgaaagtttccttttatggcgaggcggcggcggcggcggccctataaaaagcgaagcgcgcggcgggcgggagtcgctgcgttgccttcgccccgtgccccgctccgcgccgcctcgcgccgcccgccccggctctgactgaccgcgttactcccacaggtgagcgggcgggacggcccttctcctccgggctgtaattagcgcttggtttaatgacggctcgtttcttttctgtggctgcgtgaaagccttaaagggctccgggagggccctttgtgcgggggggagcggctcggggggtgcgtgcgtgtgtgtgtgcgtggggagcgccgcgtgcggcccgcgctgcccggcggctgtgagcgctgcgggcgcggcgcggggctttgtgcgctccgcgtgtgcgcgaggggagcgcggccgggggcggtgccccgcggtgcgggggggctgcgaggggaacaaaggctgcgtgcggggtgtgtgcgtgggggggtgagcagggggtgtgggcgcggcggtcgggctgtaacccccccctgcacccccctccccgagttgctgagcacggcccggcttcgggtgcggggctccgtgcggggcgtggcgcggggctcgccgtgccgggcggggggtggcggcaggtgggggtgccgggcggggcggggccgcctcgggccggggagggctcgggggaggggcgcggcggcccccggagcgccggcgtcctctgagtgctgaaggcttgctgtaggctgtatgctgttgagtctcagagatgcccgggtttttgcctccaactgactcgggattctgagactcaacagtgtatgatgcctgttactagcattcacatggatctagagcctctgctaaccatgttcatgccttcttctttttcctacagctcctgggcaacgtgctggttattgtgaccggtcgctagccaccatggtgagcaagggcgaggagctgttcaccggggtggtgcccatcctggtcgagctggacggcgacgtaaacggccacaagttcagcgtgtccggcgagggcgagggcgatgccacctacggcaagctgaccctgaagttcatctgcaccaccggcaagctgcccgtgccctggcccaccctcgtgaccaccctgacctacggcgtgcagtgcttcagccgctaccccgaccacatgaagcagcacgacttcttcaagtccgccatgcccgaaggctacgtccaggagcgcaccatcttcttcaaggacgacggcaactacaagacccgcgccgaggtgaagttcgagggcgacaccctggtgaaccgcatcgagctgaagggcatcgacttcaaggaggacggcaacatcctggggcacaagctggagtacaactacaacagccacaacgtctatatcatggccgacaagcagaagaacggcatcaaggtgaacttcaagatccgccacaacatcgaggacggcagcgtgcagctcgccgaccactaccagcagaacacccccatcggcgacggccccgtgctgctgcccgacaaccactacctgagcacccagtccgccctgagcaaagaccccaacgagaagcgcgatcacatggtcctgctggagttcgtgaccgccgccgggatcactctcggcatggacgagctgtacaagtaacctgcaggcgccggcgtcctctgagtgctgaaggcttgctgtaggctgtatgctgttgagtctcagagatgcccgggtttttgcctccaactgactcgggattctgagactcaacagtgtatgatgcctgttactagcattcacatggagagctcgctgatcagcctcgactgtgccttctagttgccagccatctgttgtttgcccctcccccgtgccttccttgaccctggaaggtgccactcccactgtcctttcctaataaaatgaggaaattgcatcgcattgtctgagtaggtgtcattctattctggggggtggggtggggcaggacagcaagggggaggattgggaagacaatagcaggcatgctggggatgcggtgggctctatggaagcttgaattcagctgacgtgcctcggaccgctaggaacccctagtgatggagttggccactccctctctgcgcgctcgctcgctcactgaggccgggcgaccaaaggtcgcccgacgcccgggctttgcccgggcggcctcagtgagcgagcgagcgcgcag

SEQ ID NO: 229 - DNA, 2963 bp, synthetic construct
  misc_feature 1..2963: note = Description of Artificial Sequence: Syntheticpolynucleotide
  source 1..2963: mol_type = other DNA
cctgcaggcagctgcgcgctcgctcgctcactgaggccgcccgggcgtcgggcgacctttggtcgcccggcctcagtgagcgagcgagcgcgcagagagggagtggccaactccatcactaggggttcctgcggccgcacgcgtgacattgattattgactagttattaatagtaatcaattacggggtcattagttcatagcccatatatggagttccgcgttacataacttacggtaaatggcccgcctggctgaccgcccaacgacccccgcccattgacgtcaataatgacgtatgttcccatagtaacgccaatagggactttccattgacgtcaatgggtggactatttacggtaaactgcccacttggcagtacatcaagtgtatcatatgccaagtacgccccctattgacgtcaatgacggtaaatggcccgcctggcattatgcccagtacatgaccttatgggactttcctacttggcagtacatctacgtattagtcatcgctattaccatgggtcgaggtgagccccacgttctgcttcactctccccatctcccccccctccccacccccaattttgtatttatttattttttaattattttgtgcagcgatgggggcggggggggggggggcgcgcgccaggcggggcggggcggggcgaggggcggggcggggcgaggcggagaggtgcggcggcagccaatcagagcggcgcgctccgaaagtttccttttatggcgaggcggcggcggcggcggccctataaaaagcgaagcgcgcggcgggcgggagtcgctgcgttgccttcgccccgtgccccgctccgcgccgcctcgcgccgcccgccccggctctgactgaccgcgttactcccacaggtgagcgggcgggacggcccttctcctccgggctgtaattagcgcttggtttaatgacggctcgtttcttttctgtggctgcgtgaaagccttaaagggctccgggagggccctttgtgcgggggggagcggctcggggggtgcgtgcgtgtgtgtgtgcgtggggagcgccgcgtgcggcccgcgctgcccggcggctgtgagcgctgcgggcgcggcgcggggctttgtgcgctccgcgtgtgcgcgaggggagcgcggccgggggcggtgccccgcggtgcgggggggctgcgaggggaacaaaggctgcgtgcggggtgtgtgcgtgggggggtgagcagggggtgtgggcgcggcggtcgggctgtaacccccccctgcacccccctccccgagttgctgagcacggcccggcttcgggtgcggggctccgtgcggggcgtggcgcggggctcgccgtgccgggcggggggtggcggcaggtgggggtgccgggcggggcggggccgcctcgggccggggagggctcgggggaggggcgcggcggcccccggagcgccggcgtcctctgagtgctgaaggcttgctgtaggctgtatgctgttgagtctcagagatgcccgggtttttgcctccaactgactcgggattctgagattcaacagtgtatgatgcctgttactagcattcacatggatctagagcctctgctaaccatgttcatgccttcttctttttcctacagctcctgggcaacgtgctggttattgtgaccggtcgctagccaccatggtgagcaagggcgaggagctgttcaccggggtggtgcccatcctggtcgagctggacggcgacgtaaacggccacaagttcagcgtgtccggcgagggcgagggcgatgccacctacggcaagctgaccctgaagttcatctgcaccaccggcaagctgcccgtgccctggcccaccctcgtgaccaccctgacctacggcgtgcagtgcttcagccgctaccccgaccacatgaagcagcacgacttcttcaagtccgccatgcccgaaggctacgtccaggagcgcaccatcttcttcaaggacgacggcaactacaagacccgcgccgaggtgaagttcgagggcgacaccctggtgaaccgcatcgagctgaagggcatcgacttcaaggaggacggcaacatcctggggcacaagctggagtacaactacaacagccacaacgtctatatcatggccgacaagcagaagaacggcatcaaggtgaacttcaagatccgccacaacatcgaggacggcagcgtgcagctcgccgaccactaccagcagaacacccccatcggcgacggccccgtgctgctgcccgacaaccactacctgagcacccagtccgccctgagcaaagaccccaacgagaagcgcgatcacatggtcctgctggagttcgtgaccgccgccgggatcactctcggcatggacgagctgtacaagtaacctgcaggcgccggcgtcctctgagtgctgaaggcttgctgtaggctgtatgctgttgagtctcagagatgcccgggtttttgcctccaactgactcgggattctgagattcaacagtgtatgatgcctgttactagcattcacatggagagctcgctgatcagcctcgactgtgccttctagttgccagccatctgttgtttgcccctcccccgtgccttccttgaccctggaaggtgccactcccactgtcctttcctaataaaatgaggaaattgcatcgcattgtctgagtaggtgtcattctattctggggggtggggtggggcaggacagcaagggggaggattgggaagacaatagcaggcatgctggggatgcggtgggctctatggaagcttgaattcagctgacgtgcctcggaccgctaggaacccctagtgatggagttggccactccctctctgcgcgctcgctcgctcactgaggccgggcgaccaaaggtcgcccgacgcccgggctttgcccgggcggcctcagtgagcgagcgagcgcgcag

SEQ ID NO: 230 - DNA, 2963 bp, synthetic construct
  misc_feature 1..2963: note = Description of Artificial Sequence: Syntheticpolynucleotide
  source 1..2963: mol_type = other DNA
cctgcaggcagctgcgcgctcgctcgctcactgaggccgcccgggcgtcgggcgacctttggtcgcccggcctcagtgagcgagcgagcgcgcagagagggagtggccaactccatcactaggggttcctgcggccgcacgcgtgacattgattattgactagttattaatagtaatcaattacggggtcattagttcatagcccatatatggagttccgcgttacataacttacggtaaatggcccgcctggctgaccgcccaacgacccccgcccattgacgtcaataatgacgtatgttcccatagtaacgccaatagggactttccattgacgtcaatgggtggactatttacggtaaactgcccacttggcagtacatcaagtgtatcatatgccaagtacgccccctattgacgtcaatgacggtaaatggcccgcctggcattatgcccagtacatgaccttatgggactttcctacttggcagtacatctacgtattagtcatcgctattaccatgggtcgaggtgagccccacgttctgcttcactctccccatctcccccccctccccacccccaattttgtatttatttattttttaattattttgtgcagcgatgggggcggggggggggggggcgcgcgccaggcggggcggggcggggcgaggggcggggcggggcgaggcggagaggtgcggcggcagccaatcagagcggcgcgctccgaaagtttccttttatggcgaggcggcggcggcggcggccctataaaaagcgaagcgcgcggcgggcgggagtcgctgcgttgccttcgccccgtgccccgctccgcgccgcctcgcgccgcccgccccggctctgactgaccgcgttactcccacaggtgagcgggcgggacggcccttctcctccgggctgtaattagcgcttggtttaatgacggctcgtttcttttctgtggctgcgtgaaagccttaaagggctccgggagggccctttgtgcgggggggagcggctcggggggtgcgtgcgtgtgtgtgtgcgtggggagcgccgcgtgcggcccgcgctgcccggcggctgtgagcgctgcgggcgcggcgcggggctttgtgcgctccgcgtgtgcgcgaggggagcgcggccgggggcggtgccccgcggtgcgggggggctgcgaggggaacaaaggctgcgtgcggggtgtgtgcgtgggggggtgagcagggggtgtgggcgcggcggtcgggctgtaacccccccctgcacccccctccccgagttgctgagcacggcccggcttcgggtgcggggctccgtgcggggcgtggcgcggggctcgccgtgccgggcggggggtggcggcaggtgggggtgccgggcggggcggggccgcctcgggccggggagggctcgggggaggggcgcggcggcccccggagcgccggcgtcctctgagtgctgaaggcttgctgtaggctgtatgctgttgagtctcagagatgcccgggtttttgcctccaactgactcgggatcctgagattcaacagtgtatgatgcctgttactagcattcacatggatctagagcctctgctaaccatgttcatgccttcttctttttcctacagctcctgggcaacgtgctggttattgtgaccggtcgctagccaccatggtgagcaagggcgaggagctgttcaccggggtggtgcccatcctggtcgagctggacggcgacgtaaacggccacaagttcagcgtgtccggcgagggcgagggcgatgccacctacggcaagctgaccctgaagttcatctgcaccaccggcaagctgcccgtgccctggcccaccctcgtgaccaccctgacctacggcgtgcagtgcttcagccgctaccccgaccacatgaagcagcacgacttcttcaagtccgccatgcccgaaggctacgtccaggagcgcaccatcttcttcaaggacgacggcaactacaagacccgcgccgaggtgaagttcgagggcgacaccctggtgaaccgcatcgagctgaagggcatcgacttcaaggaggacggcaacatcctggggcacaagctggagtacaactacaacagccacaacgtctatatcatggccgacaagcagaagaacggcatcaaggtgaacttcaagatccgccacaacatcgaggacggcagcgtgcagctcgccgaccactaccagcagaacacccccatcggcgacggccccgtgctgctgcccgacaaccactacctgagcacccagtccgccctgagcaaagaccccaacgagaagcgcgatcacatggtcctgctggagttcgtgaccgccgccgggatcactctcggcatggacgagctgtacaagtaacctgcaggcgccggcgtcctctgagtgctgaaggcttgctgtaggctgtatgctgttgagtctcagagatgcccgggtttttgcctccaactgactcgggatcctgagattcaacagtgtatgatgcctgttactagcattcacatggagagctcgctgatcagcctcgactgtgccttctagttgccagccatctgttgtttgcccctcccccgtgccttccttgaccctggaaggtgccactcccactgtcctttcctaataaaatgaggaaattgcatcgcattgtctgagtaggtgtcattctattctggggggtggggtggggcaggacagcaagggggaggattgggaagacaatagcaggcatgctggggatgcggtgggctctatggaagcttgaattcagctgacgtgcctcggaccgctaggaacccctagtgatggagttggccactccctctctgcgcgctcgctcgctcactgaggccgggcgaccaaaggtcgcccgacgcccgggctttgcccgggcggcctcagtgagcgagcgagcgcgcag

SEQ ID NO: 231 - DNA, 2963 bp, synthetic construct
  misc_feature 1..2963: note = Description of Artificial Sequence: Syntheticpolynucleotide
  source 1..2963: mol_type = other DNA
cctgcaggcagctgcgcgctcgctcgctcactgaggccgcccgggcgtcgggcgacctttggtcgcccggcctcagtgagcgagcgagcgcgcagagagggagtggccaactccatcactaggggttcctgcggccgcacgcgtgacattgattattgactagttattaatagtaatcaattacggggtcattagttcatagcccatatatggagttccgcgttacataacttacggtaaatggcccgcctggctgaccgcccaacgacccccgcccattgacgtcaataatgacgtatgttcccatagtaacgccaatagggactttccattgacgtcaatgggtggactatttacggtaaactgcccacttggcagtacatcaagtgtatcatatgccaagtacgccccctattgacgtcaatgacggtaaatggcccgcctggcattatgcccagtacatgaccttatgggactttcctacttggcagtacatctacgtattagtcatcgctattaccatgggtcgaggtgagccccacgttctgcttcactctccccatctcccccccctccccacccccaattttgtatttatttattttttaattattttgtgcagcgatgggggcggggggggggggggcgcgcgccaggcggggcggggcggggcgaggggcggggcggggcgaggcggagaggtgcggcggcagccaatcagagcggcgcgctccgaaagtttccttttatggcgaggcggcggcggcggcggccctataaaaagcgaagcgcgcggcgggcgggagtcgctgcgttgccttcgccccgtgccccgctccgcgccgcctcgcgccgcccgccccggctctgactgaccgcgttactcccacaggtgagcgggcgggacggcccttctcctccgggctgtaattagcgcttggtttaatgacggctcgtttcttttctgtggctgcgtgaaagccttaaagggctccgggagggccctttgtgcgggggggagcggctcggggggtgcgtgcgtgtgtgtgtgcgtggggagcgccgcgtgcggcccgcgctgcccggcggctgtgagcgctgcgggcgcggcgcggggctttgtgcgctccgcgtgtgcgcgaggggagcgcggccgggggcggtgccccgcggtgcgggggggctgcgaggggaacaaaggctgcgtgcggggtgtgtgcgtgggggggtgagcagggggtgtgggcgcggcggtcgggctgtaacccccccctgcacccccctccccgagttgctgagcacggcccggcttcgggtgcggggctccgtgcggggcgtggcgcggggctcgccgtgccgggcggggggtggcggcaggtgggggtgccgggcggggcggggccgcctcgggccggggagggctcgggggaggggcgcggcggcccccggagcgccggcgtcctctgagtgctgaaggcttgctgtaggctgtatgctgttgagtctcagagatgcccggaagtttgcctccaactctttcgggatcctgagattcaacagtgtatgatgcctgttactagcattcacatggatctagagcctctgctaaccatgttcatgccttcttctttttcctacagctcctgggcaacgtgctggttattgtgaccggtcgctagccaccatggtgagcaagggcgaggagctgttcaccggggtggtgcccatcctggtcgagctggacggcgacgtaaacggccacaagttcagcgtgtccggcgagggcgagggcgatgccacctacggcaagctgaccctgaagttcatctgcaccaccggcaagctgcccgtgccctggcccaccctcgtgaccaccctgacctacggcgtgcagtgcttcagccgctaccccgaccacatgaagcagcacgacttcttcaagtccgccatgcccgaaggctacgtccaggagcgcaccatcttcttcaaggacgacggcaactacaagacccgcgccgaggtgaagttcgagggcgacaccctggtgaaccgcatcgagctgaagggcatcgacttcaaggaggacggcaacatcctggggcacaagctggagtacaactacaacagccacaacgtctatatcatggccgacaagcagaagaacggcatcaaggtgaacttcaagatccgccacaacatcgaggacggcagcgtgcagctcgccgaccactaccagcagaacacccccatcggcgacggccccgtgctgctgcccgacaaccactacctgagcacccagtccgccctgagcaaagaccccaacgagaagcgcgatcacatggtcctgctggagttcgtgaccgccgccgggatcactctcggcatggacgagctgtacaagtaacctgcaggcgccggcgtcctctgagtgctgaaggcttgctgtaggctgtatgctgttgagtctcagagatgcccggaagtttgcctccaactctttcgggatcctgagattcaacagtgtatgatgcctgttactagcattcacatggagagctcgctgatcagcctcgactgtgccttctagttgccagccatctgttgtttgcccctcccccgtgccttccttgaccctggaaggtgccactcccactgtcctttcctaataaaatgaggaaattgcatcgcattgtctgagtaggtgtcattctattctggggggtggggtggggcaggacagcaagggggaggattgggaagacaatagcaggcatgctggggatgcggtgggctctatggaagcttgaattcagctgacgtgcctcggaccgctaggaacccctagtgatggagttggccactccctctctgcgcgctcgctcgctcactgaggccgggcgaccaaaggtcgcccgacgcccgggctttgcccgggcggcctcagtgagcgagcgagcgcgcag

SEQ ID NO: 232 - DNA, 2963 bp, synthetic construct
  misc_feature 1..2963: note = Description of Artificial Sequence: Syntheticpolynucleotide
  source 1..2963: mol_type = other DNA
cctgcaggcagctgcgcgctcgctcgctcactgaggccgcccgggcgtcgggcgacctttggtcgcccggcctcagtgagcgagcgagcgcgcagagagggagtggccaactccatcactaggggttcctgcggccgcacgcgtgacattgattattgactagttattaatagtaatcaattacggggtcattagttcatagcccatatatggagttccgcgttacataacttacggtaaatggcccgcctggctgaccgcccaacgacccccgcccattgacgtcaataatgacgtatgttcccatagtaacgccaatagggactttccattgacgtcaatgggtggactatttacggtaaactgcccacttggcagtacatcaagtgtatcatatgccaagtacgccccctattgacgtcaatgacggtaaatggcccgcctggcattatgcccagtacatgaccttatgggactttcctacttggcagtacatctacgtattagtcatcgctattaccatgggtcgaggtgagccccacgttctgcttcactctccccatctcccccccctccccacccccaattttgtatttatttattttttaattattttgtgcagcgatgggggcggggggggggggggcgcgcgccaggcggggcggggcggggcgaggggcggggcggggcgaggcggagaggtgcggcggcagccaatcagagcggcgcgctccgaaagtttccttttatggcgaggcggcggcggcggcggccctataaaaagcgaagcgcgcggcgggcgggagtcgctgcgttgccttcgccccgtgccccgctccgcgccgcctcgcgccgcccgccccggctctgactgaccgcgttactcccacaggtgagcgggcgggacggcccttctcctccgggctgtaattagcgcttggtttaatgacggctcgtttcttttctgtggctgcgtgaaagccttaaagggctccgggagggccctttgtgcgggggggagcggctcggggggtgcgtgcgtgtgtgtgtgcgtggggagcgccgcgtgcggcccgcgctgcccggcggctgtgagcgctgcgggcgcggcgcggggctttgtgcgctccgcgtgtgcgcgaggggagcgcggccgggggcggtgccccgcggtgcgggggggctgcgaggggaacaaaggctgcgtgcggggtgtgtgcgtgggggggtgagcagggggtgtgggcgcggcggtcgggctgtaacccccccctgcacccccctccccgagttgctgagcacggcccggcttcgggtgcggggctccgtgcggggcgtggcgcggggctcgccgtgccgggcggggggtggcggcaggtgggggtgccgggcggggcggggccgcctcgggccggggagggctcgggggaggggcgcggcggcccccggagcgccggcgtcctctgagtgctgaaggcttgctgtaggctgtatgctgttctcgaagtgcttctgccgggtttttgcctccaactgactcggcgaatacttcgagaacagtgtatgatgcctgttactagcattcacatggatctagagcctctgctaaccatgttcatgccttcttctttttcctacagctcctgggcaacgtgctggttattgtgaccggtcgctagccaccatggtgagcaagggcgaggagctgttcaccggggtggtgcccatcctggtcgagctggacggcgacgtaaacggccacaagttcagcgtgtccggcgagggcgagggcgatgccacctacggcaagctgaccctgaagttcatctgcaccaccggcaagctgcccgtgccctggcccaccctcgtgaccaccctgacctacggcgtgcagtgcttcagccgctaccccgaccacatgaagcagcacgacttcttcaagtccgccatgcccgaaggctacgtccaggagcgcaccatcttcttcaaggacgacggcaactacaagacccgcgccgaggtgaagttcgagggcgacaccctggtgaaccgcatcgagctgaagggcatcgacttcaaggaggacggcaacatcctggggcacaagctggagtacaactacaacagccacaacgtctatatcatggccgacaagcagaagaacggcatcaaggtgaacttcaagatccgccacaacatcgaggacggcagcgtgcagctcgccgaccactaccagcagaacacccccatcggcgacggccccgtgctgctgcccgacaaccactacctgagcacccagtccgccctgagcaaagaccccaacgagaagcgcgatcacatggtcctgctggagttcgtgaccgccgccgggatcactctcggcatggacgagctgtacaagtaacctgcaggcgccggcgtcctctgagtgctgaaggcttgctgtaggctgtatgctgttctcgaagtgcttctgccgggtttttgcctccaactgactcggcgaatacttcgagaacagtgtatgatgcctgttactagcattcacatggagagctcgctgatcagcctcgactgtgccttctagttgccagccatctgttgtttgcccctcccccgtgccttccttgaccctggaaggtgccactcccactgtcctttcctaataaaatgaggaaattgcatcgcattgtctgagtaggtgtcattctattctggggggtggggtggggcaggacagcaagggggaggattgggaagacaatagcaggcatgctggggatgcggtgggctctatggaagcttgaattcagctgacgtgcctcggaccgctaggaacccctagtgatggagttggccactccctctctgcgcgctcgctcgctcactgaggccgggcgaccaaaggtcgcccgacgcccgggctttgcccgggcggcctcagtgagcgagcgagcgcgcag

SEQ ID NO: 233 - DNA, 2963 bp, synthetic construct
  misc_feature 1..2963: note = Description of Artificial Sequence: Syntheticpolynucleotide
  source 1..2963: mol_type = other DNA
cctgcaggcagctgcgcgctcgctcgctcactgaggccgcccgggcgtcgggcgacctttggtcgcccggcctcagtgagcgagcgagcgcgcagagagggagtggccaactccatcactaggggttcctgcggccgcacgcgtgacattgattattgactagttattaatagtaatcaattacggggtcattagttcatagcccatatatggagttccgcgttacataacttacggtaaatggcccgcctggctgaccgcccaacgacccccgcccattgacgtcaataatgacgtatgttcccatagtaacgccaatagggactttccattgacgtcaatgggtggactatttacggtaaactgcccacttggcagtacatcaagtgtatcatatgccaagtacgccccctattgacgtcaatgacggtaaatggcccgcctggcattatgcccagtacatgaccttatgggactttcctacttggcagtacatctacgtattagtcatcgctattaccatgggtcgaggtgagccccacgttctgcttcactctccccatctcccccccctccccacccccaattttgtatttatttattttttaattattttgtgcagcgatgggggcggggggggggggggcgcgcgccaggcggggcggggcggggcgaggggcggggcggggcgaggcggagaggtgcggcggcagccaatcagagcggcgcgctccgaaagtttccttttatggcgaggcggcggcggcggcggccctataaaaagcgaagcgcgcggcgggcgggagtcgctgcgttgccttcgccccgtgccccgctccgcgccgcctcgcgccgcccgccccggctctgactgaccgcgttactcccacaggtgagcgggcgggacggcccttctcctccgggctgtaattagcgcttggtttaatgacggctcgtttcttttctgtggctgcgtgaaagccttaaagggctccgggagggccctttgtgcgggggggagcggctcggggggtgcgtgcgtgtgtgtgtgcgtggggagcgccgcgtgcggcccgcgctgcccggcggctgtgagcgctgcgggcgcggcgcggggctttgtgcgctccgcgtgtgcgcgaggggagcgcggccgggggcggtgccccgcggtgcgggggggctgcgaggggaacaaaggctgcgtgcggggtgtgtgcgtgggggggtgagcagggggtgtgggcgcggcggtcgggctgtaacccccccctgcacccccctccccgagttgctgagcacggcccggcttcgggtgcggggctccgtgcggggcgtggcgcggggctcgccgtgccgggcggggggtggcggcaggtgggggtgccgggcggggcggggccgcctcgggccggggagggctcgggggaggggcgcggcggcccccggagcgccggcgtcctctgagtgctgaaggcttgctgtaggctgtatgctgttctccaccttgaccacgcgtgtttttgcctccaactgacatgtgggtaaggtggagaacagtgtatgatgcctgttactagcattcacatggatctagagcctctgctaaccatgttcatgccttcttctttttcctacagctcctgggcaacgtgctggttattgtgaccggtcgctagccaccatggtgagcaagggcgaggagctgttcaccggggtggtgcccatcctggtcgagctggacggcgacgtaaacggccacaagttcagcgtgtccggcgagggcgagggcgatgccacctacggcaagctgaccctgaagttcatctgcaccaccggcaagctgcccgtgccctggcccaccctcgtgaccaccctgacctacggcgtgcagtgcttcagccgctaccccgaccacatgaagcagcacgacttcttcaagtccgccatgcccgaaggctacgtccaggagcgcaccatcttcttcaaggacgacggcaactacaagacccgcgccgaggtgaagttcgagggcgacaccctggtgaaccgcatcgagctgaagggcatcgacttcaaggaggacggcaacatcctggggcacaagctggagtacaactacaacagccacaacgtctatatcatggccgacaagcagaagaacggcatcaaggtgaacttcaagatccgccacaacatcgaggacggcagcgtgcagctcgccgaccactaccagcagaacacccccatcggcgacggccccgtgctgctgcccgacaaccactacctgagcacccagtccgccctgagcaaagaccccaacgagaagcgcgatcacatggtcctgctggagttcgtgaccgccgccgggatcactctcggcatggacgagctgtacaagtaacctgcaggcgccggcgtcctctgagtgctgaaggcttgctgtaggctgtatgctgttctccaccttgaccacgcgtgtttttgcctccaactgacatgtgggtaaggtggagaacagtgtatgatgcctgttactagcattcacatggagagctcgctgatcagcctcgactgtgccttctagttgccagccatctgttgtttgcccctcccccgtgccttccttgaccctggaaggtgccactcccactgtcctttcctaataaaatgaggaaattgcatcgcattgtctgagtaggtgtcattctattctggggggtggggtggggcaggacagcaagggggaggattgggaagacaatagcaggcatgctggggatgcggtgggctctatggaagcttgaattcagctgacgtgcctcggaccgctaggaacccctagtgatggagttggccactccctctctgcgcgctcgctcgctcactgaggccgggcgaccaaaggtcgcccgacgcccgggctttgcccgggcggcctcagtgagcgagcgagcgcgcag

SEQ ID NO: 234 - DNA, 2963 bp, synthetic construct
  misc_feature 1..2963: note = Description of Artificial Sequence: Syntheticpolynucleotide
  source 1..2963: mol_type = other DNA
cctgcaggcagctgcgcgctcgctcgctcactgaggccgcccgggcgtcgggcgacctttggtcgcccggcctcagtgagcgagcgagcgcgcagagagggagtggccaactccatcactaggggttcctgcggccgcacgcgtgacattgattattgactagttattaatagtaatcaattacggggtcattagttcatagcccatatatggagttccgcgttacataacttacggtaaatggcccgcctggctgaccgcccaacgacccccgcccattgacgtcaataatgacgtatgttcccatagtaacgccaatagggactttccattgacgtcaatgggtggactatttacggtaaactgcccacttggcagtacatcaagtgtatcatatgccaagtacgccccctattgacgtcaatgacggtaaatggcccgcctggcattatgcccagtacatgaccttatgggactttcctacttggcagtacatctacgtattagtcatcgctattaccatgggtcgaggtgagccccacgttctgcttcactctccccatctcccccccctccccacccccaattttgtatttatttattttttaattattttgtgcagcgatgggggcggggggggggggggcgcgcgccaggcggggcggggcggggcgaggggcggggcggggcgaggcggagaggtgcggcggcagccaatcagagcggcgcgctccgaaagtttccttttatggcgaggcggcggcggcggcggccctataaaaagcgaagcgcgcggcgggcgggagtcgctgcgttgccttcgccccgtgccccgctccgcgccgcctcgcgccgcccgccccggctctgactgaccgcgttactcccacaggtgagcgggcgggacggcccttctcctccgggctgtaattagcgcttggtttaatgacggctcgtttcttttctgtggctgcgtgaaagccttaaagggctccgggagggccctttgtgcgggggggagcggctcggggggtgcgtgcgtgtgtgtgtgcgtggggagcgccgcgtgcggcccgcgctgcccggcggctgtgagcgctgcgggcgcggcgcggggctttgtgcgctccgcgtgtgcgcgaggggagcgcggccgggggcggtgccccgcggtgcgggggggctgcgaggggaacaaaggctgcgtgcggggtgtgtgcgtgggggggtgagcagggggtgtgggcgcggcggtcgggctgtaacccccccctgcacccccctccccgagttgctgagcacggcccggcttcgggtgcggggctccgtgcggggcgtggcgcggggctcgccgtgccgggcggggggtggcggcaggtgggggtgccgggcggggcggggccgcctcgggccggggagggctcgggggaggggcgcggcggcccccggagcgccggcgtcctctgagtgctgaaggcttgctgtaggctgtatgctgatactgtcatagtagtaccaggtttttgcctccaactgacctggtctatatgacagtatcagtgtatgatgcctgttactagcattcacatggatctagagcctctgctaaccatgttcatgccttcttctttttcctacagctcctgggcaacgtgctggttattgtgaccggtcgctagccaccatggtgagcaagggcgaggagctgttcaccggggtggtgcccatcctggtcgagctggacggcgacgtaaacggccacaagttcagcgtgtccggcgagggcgagggcgatgccacctacggcaagctgaccctgaagttcatctgcaccaccggcaagctgcccgtgccctggcccaccctcgtgaccaccctgacctacggcgtgcagtgcttcagccgctaccccgaccacatgaagcagcacgacttcttcaagtccgccatgcccgaaggctacgtccaggagcgcaccatcttcttcaaggacgacggcaactacaagacccgcgccgaggtgaagttcgagggcgacaccctggtgaaccgcatcgagctgaagggcatcgacttcaaggaggacggcaacatcctggggcacaagctggagtacaactacaacagccacaacgtctatatcatggccgacaagcagaagaacggcatcaaggtgaacttcaagatccgccacaacatcgaggacggcagcgtgcagctcgccgaccactaccagcagaacacccccatcggcgacggccccgtgctgctgcccgacaaccactacctgagcacccagtccgccctgagcaaagaccccaacgagaagcgcgatcacatggtcctgctggagttcgtgaccgccgccgggatcactctcggcatggacgagctgtacaagtaacctgcaggcgccggcgtcctctgagtgctgaaggcttgctgtaggctgtatgctgatactgtcatagtagtaccaggtttttgcctccaactgacctggtctatatgacagtatcagtgtatgatgcctgttactagcattcacatggagagctcgctgatcagcctcgactgtgccttctagttgccagccatctgttgtttgcccctcccccgtgccttccttgaccctggaaggtgccactcccactgtcctttcctaataaaatgaggaaattgcatcgcattgtctgagtaggtgtcattctattctggggggtggggtggggcaggacagcaagggggaggattgggaagacaatagcaggcatgctggggatgcggtgggctctatggaagcttgaattcagctgacgtgcctcggaccgctaggaacccctagtgatggagttggccactccctctctgcgcgctcgctcgctcactgaggccgggcgaccaaaggtcgcccgacgcccgggctttgcccgggcggcctcagtgagcgagcgagcgcgcag

SEQ ID NO: 235 - DNA, 2963 bp, synthetic construct
  misc_feature 1..2963: note = Description of Artificial Sequence: Syntheticpolynucleotide
  source 1..2963: mol_type = other DNA
cctgcaggcagctgcgcgctcgctcgctcactgaggccgcccgggcgtcgggcgacctttggtcgcccggcctcagtgagcgagcgagcgcgcagagagggagtggccaactccatcactaggggttcctgcggccgcacgcgtgacattgattattgactagttattaatagtaatcaattacggggtcattagttcatagcccatatatggagttccgcgttacataacttacggtaaatggcccgcctggctgaccgcccaacgacccccgcccattgacgtcaataatgacgtatgttcccatagtaacgccaatagggactttccattgacgtcaatgggtggactatttacggtaaactgcccacttggcagtacatcaagtgtatcatatgccaagtacgccccctattgacgtcaatgacggtaaatggcccgcctggcattatgcccagtacatgaccttatgggactttcctacttggcagtacatctacgtattagtcatcgctattaccatgggtcgaggtgagccccacgttctgcttcactctccccatctcccccccctccccacccccaattttgtatttatttattttttaattattttgtgcagcgatgggggcggggggggggggggcgcgcgccaggcggggcggggcggggcgaggggcggggcggggcgaggcggagaggtgcggcggcagccaatcagagcggcgcgctccgaaagtttccttttatggcgaggcggcggcggcggcggccctataaaaagcgaagcgcgcggcgggcgggagtcgctgcgttgccttcgccccgtgccccgctccgcgccgcctcgcgccgcccgccccggctctgactgaccgcgttactcccacaggtgagcgggcgggacggcccttctcctccgggctgtaattagcgcttggtttaatgacggctcgtttcttttctgtggctgcgtgaaagccttaaagggctccgggagggccctttgtgcgggggggagcggctcggggggtgcgtgcgtgtgtgtgtgcgtggggagcgccgcgtgcggcccgcgctgcccggcggctgtgagcgctgcgggcgcggcgcggggctttgtgcgctccgcgtgtgcgcgaggggagcgcggccgggggcggtgccccgcggtgcgggggggctgcgaggggaacaaaggctgcgtgcggggtgtgtgcgtgggggggtgagcagggggtgtgggcgcggcggtcgggctgtaacccccccctgcacccccctccccgagttgctgagcacggcccggcttcgggtgcggggctccgtgcggggcgtggcgcggggctcgccgtgccgggcggggggtggcggcaggtgggggtgccgggcggggcggggccgcctcgggccggggagggctcgggggaggggcgcggcggcccccggagcgccggcgtcctctgagtgctgaaggcttgctgtaggctgtatgctgtagtcggaggtgatgtcgggggtttttgcctccaactgactcctgcataccttcgattacagtgtatgatgcctgttactagcattcacatggatctagagcctctgctaaccatgttcatgccttcttctttttcctacagctcctgggcaacgtgctggttattgtgaccggtcgctagccaccatggtgagcaagggcgaggagctgttcaccggggtggtgcccatcctggtcgagctggacggcgacgtaaacggccacaagttcagcgtgtccggcgagggcgagggcgatgccacctacggcaagctgaccctgaagttcatctgcaccaccggcaagctgcccgtgccctggcccaccctcgtgaccaccctgacctacggcgtgcagtgcttcagccgctaccccgaccacatgaagcagcacgacttcttcaagtccgccatgcccgaaggctacgtccaggagcgcaccatcttcttcaaggacgacggcaactacaagacccgcgccgaggtgaagttcgagggcgacaccctggtgaaccgcatcgagctgaagggcatcgacttcaaggaggacggcaacatcctggggcacaagctggagtacaactacaacagccacaacgtctatatcatggccgacaagcagaagaacggcatcaaggtgaacttcaagatccgccacaacatcgaggacggcagcgtgcagctcgccgaccactaccagcagaacacccccatcggcgacggccccgtgctgctgcccgacaaccactacctgagcacccagtccgccctgagcaaagaccccaacgagaagcgcgatcacatggtcctgctggagttcgtgaccgccgccgggatcactctcggcatggacgagctgtacaagtaacctgcaggcgccggcgtcctctgagtgctgaaggcttgctgtaggctgtatgctgtagtcggaggtgatgtcgggggtttttgcctccaactgactcctgcataccttcgattacagtgtatgatgcctgttactagcattcacatggagagctcgctgatcagcctcgactgtgccttctagttgccagccatctgttgtttgcccctcccccgtgccttccttgaccctggaaggtgccactcccactgtcctttcctaataaaatgaggaaattgcatcgcattgtctgagtaggtgtcattctattctggggggtggggtggggcaggacagcaagggggaggattgggaagacaatagcaggcatgctggggatgcggtgggctctatggaagcttgaattcagctgacgtgcctcggaccgctaggaacccctagtgatggagttggccactccctctctgcgcgctcgctcgctcactgaggccgggcgaccaaaggtcgcccgacgcccgggctttgcccgggcggcctcagtgagcgagcgagcgcgcag

SEQ ID NO: 236 - DNA, 2951 bp, synthetic construct
  misc_feature 1..2951: note = Description of Artificial Sequence: Syntheticpolynucleotide
  source 1..2951: mol_type = other DNA
cctgcaggcagctgcgcgctcgctcgctcactgaggccgcccgggcgtcgggcgacctttggtcgcccggcctcagtgagcgagcgagcgcgcagagagggagtggccaactccatcactaggggttcctgcggccgcacgcgtgacattgattattgactagttattaatagtaatcaattacggggtcattagttcatagcccatatatggagttccgcgttacataacttacggtaaatggcccgcctggctgaccgcccaacgacccccgcccattgacgtcaataatgacgtatgttcccatagtaacgccaatagggactttccattgacgtcaatgggtggactatttacggtaaactgcccacttggcagtacatcaagtgtatcatatgccaagtacgccccctattgacgtcaatgacggtaaatggcccgcctggcattatgcccagtacatgaccttatgggactttcctacttggcagtacatctacgtattagtcatcgctattaccatgggtcgaggtgagccccacgttctgcttcactctccccatctcccccccctccccacccccaattttgtatttatttattttttaattattttgtgcagcgatgggggcggggggggggggggcgcgcgccaggcggggcggggcggggcgaggggcggggcggggcgaggcggagaggtgcggcggcagccaatcagagcggcgcgctccgaaagtttccttttatggcgaggcggcggcggcggcggccctataaaaagcgaagcgcgcggcgggcgggagtcgctgcgttgccttcgccccgtgccccgctccgcgccgcctcgcgccgcccgccccggctctgactgaccgcgttactcccacaggtgagcgggcgggacggcccttctcctccgggctgtaattagcgcttggtttaatgacggctcgtttcttttctgtggctgcgtgaaagccttaaagggctccgggagggccctttgtgcgggggggagcggctcggggggtgcgtgcgtgtgtgtgtgcgtggggagcgccgcgtgcggcccgcgctgcccggcggctgtgagcgctgcgggcgcggcgcggggctttgtgcgctccgcgtgtgcgcgaggggagcgcggccgggggcggtgccccgcggtgcgggggggctgcgaggggaacaaaggctgcgtgcggggtgtgtgcgtgggggggtgagcagggggtgtgggcgcggcggtcgggctgtaacccccccctgcacccccctccccgagttgctgagcacggcccggcttcgggtgcggggctccgtgcggggcgtggcgcggggctcgccgtgccgggcggggggtggcggcaggtgggggtgccgggcggggcggggccgcctcgggccggggagggctcgggggaggggcgcggcggcccccggagcgccggcgcatagctcttatgatagcaatgtcagcagtgcctttgagaatcctgatggagcgggttaagattctaaaattatcacgctccatgagtgattctcagaagtaaggttgaccatactctacagttgtgtctagagcctctgctaaccatgttcatgccttcttctttttcctacagctcctgggcaacgtgctggttattgtgaccggtcgctagccaccatggtgagcaagggcgaggagctgttcaccggggtggtgcccatcctggtcgagctggacggcgacgtaaacggccacaagttcagcgtgtccggcgagggcgagggcgatgccacctacggcaagctgaccctgaagttcatctgcaccaccggcaagctgcccgtgccctggcccaccctcgtgaccaccctgacctacggcgtgcagtgcttcagccgctaccccgaccacatgaagcagcacgacttcttcaagtccgccatgcccgaaggctacgtccaggagcgcaccatcttcttcaaggacgacggcaactacaagacccgcgccgaggtgaagttcgagggcgacaccctggtgaaccgcatcgagctgaagggcatcgacttcaaggaggacggcaacatcctggggcacaagctggagtacaactacaacagccacaacgtctatatcatggccgacaagcagaagaacggcatcaaggtgaacttcaagatccgccacaacatcgaggacggcagcgtgcagctcgccgaccactaccagcagaacacccccatcggcgacggccccgtgctgctgcccgacaaccactacctgagcacccagtccgccctgagcaaagaccccaacgagaagcgcgatcacatggtcctgctggagttcgtgaccgccgccgggatcactctcggcatggacgagctgtacaagtaacctgcaggcgccggcgcatagctcttatgatagcaatgtcagcagtgcctttgagaatcctgatggagcgggttaagattctaaaattatcacgctccatgagtgattctcagaagtaaggttgaccatactctacagttgtggagctcgctgatcagcctcgactgtgccttctagttgccagccatctgttgtttgcccctcccccgtgccttccttgaccctggaaggtgccactcccactgtcctttcctaataaaatgaggaaattgcatcgcattgtctgagtaggtgtcattctattctggggggtggggtggggcaggacagcaagggggaggattgggaagacaatagcaggcatgctggggatgcggtgggctctatggaagcttgaattcagctgacgtgcctcggaccgctaggaacccctagtgatggagttggccactccctctctgcgcgctcgctcgctcactgaggccgggcgaccaaaggtcgcccgacgcccgggctttgcccgggcggcctcagtgagcgagcgagcgcgcag

SEQ ID NO: 237 - DNA, 2989 bp, synthetic construct
  misc_feature 1..2989: note = Description of Artificial Sequence: Syntheticpolynucleotide
  source 1..2989: mol_type = other DNA
cctgcaggcagctgcgcgctcgctcgctcactgaggccgcccgggcgtcgggcgacctttggtcgcccggcctcagtgagcgagcgagcgcgcagagagggagtggccaactccatcactaggggttcctgcggccgcacgcgtgacattgattattgactagttattaatagtaatcaattacggggtcattagttcatagcccatatatggagttccgcgttacataacttacggtaaatggcccgcctggctgaccgcccaacgacccccgcccattgacgtcaataatgacgtatgttcccatagtaacgccaatagggactttccattgacgtcaatgggtggactatttacggtaaactgcccacttggcagtacatcaagtgtatcatatgccaagtacgccccctattgacgtcaatgacggtaaatggcccgcctggcattatgcccagtacatgaccttatgggactttcctacttggcagtacatctacgtattagtcatcgctattaccatgggtcgaggtgagccccacgttctgcttcactctccccatctcccccccctccccacccccaattttgtatttatttattttttaattattttgtgcagcgatgggggcggggggggggggggcgcgcgccaggcggggcggggcggggcgaggggcggggcggggcgaggcggagaggtgcggcggcagccaatcagagcggcgcgctccgaaagtttccttttatggcgaggcggcggcggcggcggccctataaaaagcgaagcgcgcggcgggcgggagtcgctgcgttgccttcgccccgtgccccgctccgcgccgcctcgcgccgcccgccccggctctgactgaccgcgttactcccacaggtgagcgggcgggacggcccttctcctccgggctgtaattagcgcttggtttaatgacggctcgtttcttttctgtggctgcgtgaaagccttaaagggctccgggagggccctttgtgcgggggggagcggctcggggggtgcgtgcgtgtgtgtgtgcgtggggagcgccgcgtgcggcccgcgctgcccggcggctgtgagcgctgcgggcgcggcgcggggctttgtgcgctccgcgtgtgcgcgaggggagcgcggccgggggcggtgccccgcggtgcgggggggctgcgaggggaacaaaggctgcgtgcggggtgtgtgcgtgggggggtgagcagggggtgtgggcgcggcggtcgggctgtaacccccccctgcacccccctccccgagttgctgagcacggcccggcttcgggtgcggggctccgtgcggggcgtggcgcggggctcgccgtgccgggcggggggtggcggcaggtgggggtgccgggcggggcggggccgcctcgggccggggagggctcgggggaggggcgcggcggcccccggagcgccggcggagcaggaggaccaaggccctggcgaaggccgtggcctcgttgagaatcctgatggagcggtgtgcaggtcccaatggccgctccataaggattctccacggggacgcgggcctggacgccggcatccgggctcaggacccccctctctagagcctctgctaaccatgttcatgccttcttctttttcctacagctcctgggcaacgtgctggttattgtgaccggtcgctagccaccatggtgagcaagggcgaggagctgttcaccggggtggtgcccatcctggtcgagctggacggcgacgtaaacggccacaagttcagcgtgtccggcgagggcgagggcgatgccacctacggcaagctgaccctgaagttcatctgcaccaccggcaagctgcccgtgccctggcccaccctcgtgaccaccctgacctacggcgtgcagtgcttcagccgctaccccgaccacatgaagcagcacgacttcttcaagtccgccatgcccgaaggctacgtccaggagcgcaccatcttcttcaaggacgacggcaactacaagacccgcgccgaggtgaagttcgagggcgacaccctggtgaaccgcatcgagctgaagggcatcgacttcaaggaggacggcaacatcctggggcacaagctggagtacaactacaacagccacaacgtctatatcatggccgacaagcagaagaacggcatcaaggtgaacttcaagatccgccacaacatcgaggacggcagcgtgcagctcgccgaccactaccagcagaacacccccatcggcgacggccccgtgctgctgcccgacaaccactacctgagcacccagtccgccctgagcaaagaccccaacgagaagcgcgatcacatggtcctgctggagttcgtgaccgccgccgggatcactctcggcatggacgagctgtacaagtaacctgcaggcgccggcggagcaggaggaccaaggccctggcgaaggccgtggcctcgttgagaatcctgatggagcggtgtgcaggtcccaatggccgctccataaggattctccacggggacgcgggcctggacgccggcatccgggctcaggacccccctcgagctcgctgatcagcctcgactgtgccttctagttgccagccatctgttgtttgcccctcccccgtgccttccttgaccctggaaggtgccactcccactgtcctttcctaataaaatgaggaaattgcatcgcattgtctgagtaggtgtcattctattctggggggtggggtggggcaggacagcaagggggaggattgggaagacaatagcaggcatgctggggatgcggtgggctctatggaagcttgaattcagctgacgtgcctcggaccgctaggaacccctagtgatggagttggccactccctctctgcgcgctcgctcgctcactgaggccgggcgaccaaaggtcgcccgacgcccgggctttgcccgggcggcctcagtgagcgagcgagcgcgcag

SEQ ID NO: 238 - DNA, 2993 bp, synthetic construct
  misc_feature 1..2993: note = Description of Artificial Sequence: Syntheticpolynucleotide
  source 1..2993: mol_type = other DNA
cctgcaggcagctgcgcgctcgctcgctcactgaggccgcccgggcgtcgggcgacctttggtcgcccggcctcagtgagcgagcgagcgcgcagagagggagtggccaactccatcactaggggttcctgcggccgcacgcgtgacattgattattgactagttattaatagtaatcaattacggggtcattagttcatagcccatatatggagttccgcgttacataacttacggtaaatggcccgcctggctgaccgcccaacgacccccgcccattgacgtcaataatgacgtatgttcccatagtaacgccaatagggactttccattgacgtcaatgggtggactatttacggtaaactgcccacttggcagtacatcaagtgtatcatatgccaagtacgccccctattgacgtcaatgacggtaaatggcccgcctggcattatgcccagtacatgaccttatgggactttcctacttggcagtacatctacgtattagtcatcgctattaccatgggtcgaggtgagccccacgttctgcttcactctccccatctcccccccctccccacccccaattttgtatttatttattttttaattattttgtgcagcgatgggggcggggggggggggggcgcgcgccaggcggggcggggcggggcgaggggcggggcggggcgaggcggagaggtgcggcggcagccaatcagagcggcgcgctccgaaagtttccttttatggcgaggcggcggcggcggcggccctataaaaagcgaagcgcgcggcgggcgggagtcgctgcgttgccttcgccccgtgccccgctccgcgccgcctcgcgccgcccgccccggctctgactgaccgcgttactcccacaggtgagcgggcgggacggcccttctcctccgggctgtaattagcgcttggtttaatgacggctcgtttcttttctgtggctgcgtgaaagccttaaagggctccgggagggccctttgtgcgggggggagcggctcggggggtgcgtgcgtgtgtgtgtgcgtggggagcgccgcgtgcggcccgcgctgcccggcggctgtgagcgctgcgggcgcggcgcggggctttgtgcgctccgcgtgtgcgcgaggggagcgcggccgggggcggtgccccgcggtgcgggggggctgcgaggggaacaaaggctgcgtgcggggtgtgtgcgtgggggggtgagcagggggtgtgggcgcggcggtcgggctgtaacccccccctgcacccccctccccgagttgctgagcacggcccggcttcgggtgcggggctccgtgcggggcgtggcgcggggctcgccgtgccgggcggggggtggcggcaggtgggggtgccgggcggggcggggccgcctcgggccggggagggctcgggggaggggcgcggcggcccccggagcgccggcggtgtccccagagagcccgcaccagtgccatctgcttggccgatttgagaatcctgatggagcggcttgtgtctctccgctctgagccgggccatcagattctcatatgggaaaagcaggacccgcagctgcgtccgcctcccctgcattctagagcctctgctaaccatgttcatgccttcttctttttcctacagctcctgggcaacgtgctggttattgtgaccggtcgctagccaccatggtgagcaagggcgaggagctgttcaccggggtggtgcccatcctggtcgagctggacggcgacgtaaacggccacaagttcagcgtgtccggcgagggcgagggcgatgccacctacggcaagctgaccctgaagttcatctgcaccaccggcaagctgcccgtgccctggcccaccctcgtgaccaccctgacctacggcgtgcagtgcttcagccgctaccccgaccacatgaagcagcacgacttcttcaagtccgccatgcccgaaggctacgtccaggagcgcaccatcttcttcaaggacgacggcaactacaagacccgcgccgaggtgaagttcgagggcgacaccctggtgaaccgcatcgagctgaagggcatcgacttcaaggaggacggcaacatcctggggcacaagctggagtacaactacaacagccacaacgtctatatcatggccgacaagcagaagaacggcatcaaggtgaacttcaagatccgccacaacatcgaggacggcagcgtgcagctcgccgaccactaccagcagaacacccccatcggcgacggccccgtgctgctgcccgacaaccactacctgagcacccagtccgccctgagcaaagaccccaacgagaagcgcgatcacatggtcctgctggagttcgtgaccgccgccgggatcactctcggcatggacgagctgtacaagtaacctgcaggcgccggcggtgtccccagagagcccgcaccagtgccatctgcttggccgatttgagaatcctgatggagcggcttgtgtctctccgctctgagccgggccatcagattctcatatgggaaaagcaggacccgcagctgcgtccgcctcccctgcatgagctcgctgatcagcctcgactgtgccttctagttgccagccatctgttgtttgcccctcccccgtgccttccttgaccctggaaggtgccactcccactgtcctttcctaataaaatgaggaaattgcatcgcattgtctgagtaggtgtcattctattctggggggtggggtggggcaggacagcaagggggaggattgggaagacaatagcaggcatgctggggatgcggtgggctctatggaagcttgaattcagctgacgtgcctcggaccgctaggaacccctagtgatggagttggccactccctctctgcgcgctcgctcgctcactgaggccgggcgaccaaaggtcgcccgacgcccgggctttgcccgggcggcctcagtgagcgagcgagcgcgcag

SEQ ID NO: 239 - DNA, 2991 bp, synthetic construct
  misc_feature 1..2991: note = Description of Artificial Sequence: Syntheticpolynucleotide
  source 1..2991: mol_type = other DNA
cctgcaggcagctgcgcgctcgctcgctcactgaggccgcccgggcgtcgggcgacctttggtcgcccggcctcagtgagcgagcgagcgcgcagagagggagtggccaactccatcactaggggttcctgcggccgcacgcgtgacattgattattgactagttattaatagtaatcaattacggggtcattagttcatagcccatatatggagttccgcgttacataacttacggtaaatggcccgcctggctgaccgcccaacgacccccgcccattgacgtcaataatgacgtatgttcccatagtaacgccaatagggactttccattgacgtcaatgggtggactatttacggtaaactgcccacttggcagtacatcaagtgtatcatatgccaagtacgccccctattgacgtcaatgacggtaaatggcccgcctggcattatgcccagtacatgaccttatgggactttcctacttggcagtacatctacgtattagtcatcgctattaccatgggtcgaggtgagccccacgttctgcttcactctccccatctcccccccctccccacccccaattttgtatttatttattttttaattattttgtgcagcgatgggggcggggggggggggggcgcgcgccaggcggggcggggcggggcgaggggcggggcggggcgaggcggagaggtgcggcggcagccaatcagagcggcgcgctccgaaagtttccttttatggcgaggcggcggcggcggcggccctataaaaagcgaagcgcgcggcgggcgggagtcgctgcgttgccttcgccccgtgccccgctccgcgccgcctcgcgccgcccgccccggctctgactgaccgcgttactcccacaggtgagcgggcgggacggcccttctcctccgggctgtaattagcgcttggtttaatgacggctcgtttcttttctgtggctgcgtgaaagccttaaagggctccgggagggccctttgtgcgggggggagcggctcggggggtgcgtgcgtgtgtgtgtgcgtggggagcgccgcgtgcggcccgcgctgcccggcggctgtgagcgctgcgggcgcggcgcggggctttgtgcgctccgcgtgtgcgcgaggggagcgcggccgggggcggtgccccgcggtgcgggggggctgcgaggggaacaaaggctgcgtgcggggtgtgtgcgtgggggggtgagcagggggtgtgggcgcggcggtcgggctgtaacccccccctgcacccccctccccgagttgctgagcacggcccggcttcgggtgcggggctccgtgcggggcgtggcgcggggctcgccgtgccgggcggggggtggcggcaggtgggggtgccgggcggggcggggccgcctcgggccggggagggctcgggggaggggcgcggcggcccccggagcgccggcgtgaagttaacaccttcgtggctacagagtttccttagcagagctgttgagaatcctgatggagcgggtgtctaaactatcccgctccatccggattctacatagctactgctaggcaatccttccctcgataaatgtcttggcatcgtctagagcctctgctaaccatgttcatgccttcttctttttcctacagctcctgggcaacgtgctggttattgtgaccggtcgctagccaccatggtgagcaagggcgaggagctgttcaccggggtggtgcccatcctggtcgagctggacggcgacgtaaacggccacaagttcagcgtgtccggcgagggcgagggcgatgccacctacggcaagctgaccctgaagttcatctgcaccaccggcaagctgcccgtgccctggcccaccctcgtgaccaccctgacctacggcgtgcagtgcttcagccgctaccccgaccacatgaagcagcacgacttcttcaagtccgccatgcccgaaggctacgtccaggagcgcaccatcttcttcaaggacgacggcaactacaagacccgcgccgaggtgaagttcgagggcgacaccctggtgaaccgcatcgagctgaagggcatcgacttcaaggaggacggcaacatcctggggcacaagctggagtacaactacaacagccacaacgtctatatcatggccgacaagcagaagaacggcatcaaggtgaacttcaagatccgccacaacatcgaggacggcagcgtgcagctcgccgaccactaccagcagaacacccccatcggcgacggccccgtgctgctgcccgacaaccactacctgagcacccagtccgccctgagcaaagaccccaacgagaagcgcgatcacatggtcctgctggagttcgtgaccgccgccgggatcactctcggcatggacgagctgtacaagtaacctgcaggcgccggcgtgaagttaacaccttcgtggctacagagtttccttagcagagctgttgagaatcctgatggagcgggtgtctaaactatcccgctccatccggattctacatagctactgctaggcaatccttccctcgataaatgtcttggcatcggagctcgctgatcagcctcgactgtgccttctagttgccagccatctgttgtttgcccctcccccgtgccttccttgaccctggaaggtgccactcccactgtcctttcctaataaaatgaggaaattgcatcgcattgtctgagtaggtgtcattctattctggggggtggggtggggcaggacagcaagggggaggattgggaagacaatagcaggcatgctggggatgcggtgggctctatggaagcttgaattcagctgacgtgcctcggaccgctaggaacccctagtgatggagttggccactccctctctgcgcgctcgctcgctcactgaggccgggcgaccaaaggtcgcccgacgcccgggctttgcccgggcggcctcagtgagcgagcgagcgcgcag

SEQ ID NO: 240 - DNA, 2939 bp, synthetic construct
  misc_feature 1..2939: note = Description of Artificial Sequence: Syntheticpolynucleotide
  source 1..2939: mol_type = other DNA
cctgcaggcagctgcgcgctcgctcgctcactgaggccgcccgggcgtcgggcgacctttggtcgcccggcctcagtgagcgagcgagcgcgcagagagggagtggccaactccatcactaggggttcctgcggccgcacgcgtgacattgattattgactagttattaatagtaatcaattacggggtcattagttcatagcccatatatggagttccgcgttacataacttacggtaaatggcccgcctggctgaccgcccaacgacccccgcccattgacgtcaataatgacgtatgttcccatagtaacgccaatagggactttccattgacgtcaatgggtggactatttacggtaaactgcccacttggcagtacatcaagtgtatcatatgccaagtacgccccctattgacgtcaatgacggtaaatggcccgcctggcattatgcccagtacatgaccttatgggactttcctacttggcagtacatctacgtattagtcatcgctattaccatgggtcgaggtgagccccacgttctgcttcactctccccatctcccccccctccccacccccaattttgtatttatttattttttaattattttgtgcagcgatgggggcggggggggggggggcgcgcgccaggcggggcggggcggggcgaggggcggggcggggcgaggcggagaggtgcggcggcagccaatcagagcggcgcgctccgaaagtttccttttatggcgaggcggcggcggcggcggccctataaaaagcgaagcgcgcggcgggcgggagtcgctgcgttgccttcgccccgtgccccgctccgcgccgcctcgcgccgcccgccccggctctgactgaccgcgttactcccacaggtgagcgggcgggacggcccttctcctccgggctgtaattagcgcttggtttaatgacggctcgtttcttttctgtggctgcgtgaaagccttaaagggctccgggagggccctttgtgcgggggggagcggctcggggggtgcgtgcgtgtgtgtgtgcgtggggagcgccgcgtgcggcccgcgctgcccggcggctgtgagcgctgcgggcgcggcgcggggctttgtgcgctccgcgtgtgcgcgaggggagcgcggccgggggcggtgccccgcggtgcgggggggctgcgaggggaacaaaggctgcgtgcggggtgtgtgcgtgggggggtgagcagggggtgtgggcgcggcggtcgggctgtaacccccccctgcacccccctccccgagttgctgagcacggcccggcttcgggtgcggggctccgtgcggggcgtggcgcggggctcgccgtgccgggcggggggtggcggcaggtgggggtgccgggcggggcggggccgcctcgggccggggagggctcgggggaggggcgcggcggcccccggagcgccggcggccgctggacccctccactctgctgtggccttgagaatcctgatggagcgggattgctgtcccaaactcccgctccatcggattctcaaggctacagtgaggggcgagctccttctcctgctctagagcctctgctaaccatgttcatgccttcttctttttcctacagctcctgggcaacgtgctggttattgtgaccggtcgctagccaccatggtgagcaagggcgaggagctgttcaccggggtggtgcccatcctggtcgagctggacggcgacgtaaacggccacaagttcagcgtgtccggcgagggcgagggcgatgccacctacggcaagctgaccctgaagttcatctgcaccaccggcaagctgcccgtgccctggcccaccctcgtgaccaccctgacctacggcgtgcagtgcttcagccgctaccccgaccacatgaagcagcacgacttcttcaagtccgccatgcccgaaggctacgtccaggagcgcaccatcttcttcaaggacgacggcaactacaagacccgcgccgaggtgaagttcgagggcgacaccctggtgaaccgcatcgagctgaagggcatcgacttcaaggaggacggcaacatcctggggcacaagctggagtacaactacaacagccacaacgtctatatcatggccgacaagcagaagaacggcatcaaggtgaacttcaagatccgccacaacatcgaggacggcagcgtgcagctcgccgaccactaccagcagaacacccccatcggcgacggccccgtgctgctgcccgacaaccactacctgagcacccagtccgccctgagcaaagaccccaacgagaagcgcgatcacatggtcctgctggagttcgtgaccgccgccgggatcactctcggcatggacgagctgtacaagtaacctgcaggcgccggcggccgctggacccctccactctgctgtggccttgagaatcctgatggagcgggattgctgtcccaaactcccgctccatcggattctcaaggctacagtgaggggcgagctccttctcctgcgagctcgctgatcagcctcgactgtgccttctagttgccagccatctgttgtttgcccctcccccgtgccttccttgaccctggaaggtgccactcccactgtcctttcctaataaaatgaggaaattgcatcgcattgtctgagtaggtgtcattctattctggggggtggggtggggcaggacagcaagggggaggattgggaagacaatagcaggcatgctggggatgcggtgggctctatggaagcttgaattcagctgacgtgcctcggaccgctaggaacccctagtgatggagttggccactccctctctgcgcgctcgctcgctcactgaggccgggcgaccaaaggtcgcccgacgcccgggctttgcccgggcggcctcagtgagcgagcgagcgcgcag

SEQ ID NO: 241 - DNA, 2995 bp, synthetic construct
  misc_feature 1..2995: note = Description of Artificial Sequence: Syntheticpolynucleotide
  source 1..2995: mol_type = other DNA
cctgcaggcagctgcgcgctcgctcgctcactgaggccgcccgggcgtcgggcgacctttggtcgcccggcctcagtgagcgagcgagcgcgcagagagggagtggccaactccatcactaggggttcctgcggccgcacgcgtgacattgattattgactagttattaatagtaatcaattacggggtcattagttcatagcccatatatggagttccgcgttacataacttacggtaaatggcccgcctggctgaccgcccaacgacccccgcccattgacgtcaataatgacgtatgttcccatagtaacgccaatagggactttccattgacgtcaatgggtggactatttacggtaaactgcccacttggcagtacatcaagtgtatcatatgccaagtacgccccctattgacgtcaatgacggtaaatggcccgcctggcattatgcccagtacatgaccttatgggactttcctacttggcagtacatctacgtattagtcatcgctattaccatgggtcgaggtgagccccacgttctgcttcactctccccatctcccccccctccccacccccaattttgtatttatttattttttaattattttgtgcagcgatgggggcggggggggggggggcgcgcgccaggcggggcggggcggggcgaggggcggggcggggcgaggcggagaggtgcggcggcagccaatcagagcggcgcgctccgaaagtttccttttatggcgaggcggcggcggcggcggccctataaaaagcgaagcgcgcggcgggcgggagtcgctgcgttgccttcgccccgtgccccgctccgcgccgcctcgcgccgcccgccccggctctgactgaccgcgttactcccacaggtgagcgggcgggacggcccttctcctccgggctgtaattagcgcttggtttaatgacggctcgtttcttttctgtggctgcgtgaaagccttaaagggctccgggagggccctttgtgcgggggggagcggctcggggggtgcgtgcgtgtgtgtgtgcgtggggagcgccgcgtgcggcccgcgctgcccggcggctgtgagcgctgcgggcgcggcgcggggctttgtgcgctccgcgtgtgcgcgaggggagcgcggccgggggcggtgccccgcggtgcgggggggctgcgaggggaacaaaggctgcgtgcggggtgtgtgcgtgggggggtgagcagggggtgtgggcgcggcggtcgggctgtaacccccccctgcacccccctccccgagttgctgagcacggcccggcttcgggtgcggggctccgtgcggggcgtggcgcggggctcgccgtgccgggcggggggtggcggcaggtgggggtgccgggcggggcggggccgcctcgggccggggagggctcgggggaggggcgcggcggcccccggagcgccggcgctccccagctcctggggggagctgcttgcctccccccgttttgagaatcctgatggagcggactggtgaggtaacaggatccgccgtccatctttattctcactatggggcgaggactcagccggcaccctgtgcacagccagcgagggtctagagcctctgctaaccatgttcatgccttcttctttttcctacagctcctgggcaacgtgctggttattgtgaccggtcgctagccaccatggtgagcaagggcgaggagctgttcaccggggtggtgcccatcctggtcgagctggacggcgacgtaaacggccacaagttcagcgtgtccggcgagggcgagggcgatgccacctacggcaagctgaccctgaagttcatctgcaccaccggcaagctgcccgtgccctggcccaccctcgtgaccaccctgacctacggcgtgcagtgcttcagccgctaccccgaccacatgaagcagcacgacttcttcaagtccgccatgcccgaaggctacgtccaggagcgcaccatcttcttcaaggacgacggcaactacaagacccgcgccgaggtgaagttcgagggcgacaccctggtgaaccgcatcgagctgaagggcatcgacttcaaggaggacggcaacatcctggggcacaagctggagtacaactacaacagccacaacgtctatatcatggccgacaagcagaagaacggcatcaaggtgaacttcaagatccgccacaacatcgaggacggcagcgtgcagctcgccgaccactaccagcagaacacccccatcggcgacggccccgtgctgctgcccgacaaccactacctgagcacccagtccgccctgagcaaagaccccaacgagaagcgcgatcacatggtcctgctggagttcgtgaccgccgccgggatcactctcggcatggacgagctgtacaagtaacctgcaggcgccggcgctccccagctcctggggggagctgcttgcctccccccgttttgagaatcctgatggagcggactggtgaggtaacaggatccgccgtccatctttattctcactatggggcgaggactcagccggcaccctgtgcacagccagcgaggggagctcgctgatcagcctcgactgtgccttctagttgccagccatctgttgtttgcccctcccccgtgccttccttgaccctggaaggtgccactcccactgtcctttcctaataaaatgaggaaattgcatcgcattgtctgagtaggtgtcattctattctggggggtggggtggggcaggacagcaagggggaggattgggaagacaatagcaggcatgctggggatgcggtgggctctatggaagcttgaattcagctgacgtgcctcggaccgctaggaacccctagtgatggagttggccactccctctctgcgcgctcgctcgctcactgaggccgggcgaccaaaggtcgcccgacgcccgggctttgcccgggcggcctcagtgagcgagcgagcgcgcag

SEQ ID NO: 242 - DNA, 2977 bp, synthetic construct
  misc_feature 1..2977: note = Description of Artificial Sequence: Syntheticpolynucleotide
  source 1..2977: mol_type = other DNA
cctgcaggcagctgcgcgctcgctcgctcactgaggccgcccgggcgtcgggcgacctttggtcgcccggcctcagtgagcgagcgagcgcgcagagagggagtggccaactccatcactaggggttcctgcggccgcacgcgtgacattgattattgactagttattaatagtaatcaattacggggtcattagttcatagcccatatatggagttccgcgttacataacttacggtaaatggcccgcctggctgaccgcccaacgacccccgcccattgacgtcaataatgacgtatgttcccatagtaacgccaatagggactttccattgacgtcaatgggtggactatttacggtaaactgcccacttggcagtacatcaagtgtatcatatgccaagtacgccccctattgacgtcaatgacggtaaatggcccgcctggcattatgcccagtacatgaccttatgggactttcctacttggcagtacatctacgtattagtcatcgctattaccatgggtcgaggtgagccccacgttctgcttcactctccccatctcccccccctccccacccccaattttgtatttatttattttttaattattttgtgcagcgatgggggcggggggggggggggcgcgcgccaggcggggcggggcggggcgaggggcggggcggggcgaggcggagaggtgcggcggcagccaatcagagcggcgcgctccgaaagtttccttttatggcgaggcggcggcggcggcggccctataaaaagcgaagcgcgcggcgggcgggagtcgctgcgttgccttcgccccgtgccccgctccgcgccgcctcgcgccgcccgccccggctctgactgaccgcgttactcccacaggtgagcgggcgggacggcccttctcctccgggctgtaattagcgcttggtttaatgacggctcgtttcttttctgtggctgcgtgaaagccttaaagggctccgggagggccctttgtgcgggggggagcggctcggggggtgcgtgcgtgtgtgtgtgcgtggggagcgccgcgtgcggcccgcgctgcccggcggctgtgagcgctgcgggcgcggcgcggggctttgtgcgctccgcgtgtgcgcgaggggagcgcggccgggggcggtgccccgcggtgcgggggggctgcgaggggaacaaaggctgcgtgcggggtgtgtgcgtgggggggtgagcagggggtgtgggcgcggcggtcgggctgtaacccccccctgcacccccctccccgagttgctgagcacggcccggcttcgggtgcggggctccgtgcggggcgtggcgcggggctcgccgtgccgggcggggggtggcggcaggtgggggtgccgggcggggcggggccgcctcgggccggggagggctcgggggaggggcgcggcggcccccggagcgccggcgagggtcggcaggccgcagagtgtgactcctgttctgtgtttgagaatcctgatggagcgggtgaacagtctcagtcccgctcccaggaaatggtcaaaaacagagcagagacagatccacgagggcctccggagcacctttctagagcctctgctaaccatgttcatgccttcttctttttcctacagctcctgggcaacgtgctggttattgtgaccggtcgctagccaccatggtgagcaagggcgaggagctgttcaccggggtggtgcccatcctggtcgagctggacggcgacgtaaacggccacaagttcagcgtgtccggcgagggcgagggcgatgccacctacggcaagctgaccctgaagttcatctgcaccaccggcaagctgcccgtgccctggcccaccctcgtgaccaccctgacctacggcgtgcagtgcttcagccgctaccccgaccacatgaagcagcacgacttcttcaagtccgccatgcccgaaggctacgtccaggagcgcaccatcttcttcaaggacgacggcaactacaagacccgcgccgaggtgaagttcgagggcgacaccctggtgaaccgcatcgagctgaagggcatcgacttcaaggaggacggcaacatcctggggcacaagctggagtacaactacaacagccacaacgtctatatcatggccgacaagcagaagaacggcatcaaggtgaacttcaagatccgccacaacatcgaggacggcagcgtgcagctcgccgaccactaccagcagaacacccccatcggcgacggccccgtgctgctgcccgacaaccactacctgagcacccagtccgccctgagcaaagaccccaacgagaagcgcgatcacatggtcctgctggagttcgtgaccgccgccgggatcactctcggcatggacgagctgtacaagtaacctgcaggcgccggcgagggtcggcaggccgcagagtgtgactcctgttctgtgtttgagaatcctgatggagcgggtgaacagtctcagtcccgctcccaggaaatggtcaaaaacagagcagagacagatccacgagggcctccggagcaccttgagctcgctgatcagcctcgactgtgccttctagttgccagccatctgttgtttgcccctcccccgtgccttccttgaccctggaaggtgccactcccactgtcctttcctaataaaatgaggaaattgcatcgcattgtctgagtaggtgtcattctattctggggggtggggtggggcaggacagcaagggggaggattgggaagacaatagcaggcatgctggggatgcggtgggctctatggaagcttgaattcagctgacgtgcctcggaccgctaggaacccctagtgatggagttggccactccctctctgcgcgctcgctcgctcactgaggccgggcgaccaaaggtcgcccgacgcccgggctttgcccgggcggcctcagtgagcgagcgagcgcgcag

SEQ ID NO: 243 - DNA, 2943 bp, synthetic construct
  misc_feature 1..2943: note = Description of Artificial Sequence: Syntheticpolynucleotide
  source 1..2943: mol_type = other DNA
cctgcaggcagctgcgcgctcgctcgctcactgaggccgcccgggcgtcgggcgacctttggtcgcccggcctcagtgagcgagcgagcgcgcagagagggagtggccaactccatcactaggggttcctgcggccgcacgcgtgacattgattattgactagttattaatagtaatcaattacggggtcattagttcatagcccatatatggagttccgcgttacataacttacggtaaatggcccgcctggctgaccgcccaacgacccccgcccattgacgtcaataatgacgtatgttcccatagtaacgccaatagggactttccattgacgtcaatgggtggactatttacggtaaactgcccacttggcagtacatcaagtgtatcatatgccaagtacgccccctattgacgtcaatgacggtaaatggcccgcctggcattatgcccagtacatgaccttatgggactttcctacttggcagtacatctacgtattagtcatcgctattaccatgggtcgaggtgagccccacgttctgcttcactctccccatctcccccccctccccacccccaattttgtatttatttattttttaattattttgtgcagcgatgggggcggggggggggggggcgcgcgccaggcggggcggggcggggcgaggggcggggcggggcgaggcggagaggtgcggcggcagccaatcagagcggcgcgctccgaaagtttccttttatggcgaggcggcggcggcggcggccctataaaaagcgaagcgcgcggcgggcgggagtcgctgcgttgccttcgccccgtgccccgctccgcgccgcctcgcgccgcccgccccggctctgactgaccgcgttactcccacaggtgagcgggcgggacggcccttctcctccgggctgtaattagcgcttggtttaatgacggctcgtttcttttctgtggctgcgtgaaagccttaaagggctccgggagggccctttgtgcgggggggagcggctcggggggtgcgtgcgtgtgtgtgtgcgtggggagcgccgcgtgcggcccgcgctgcccggcggctgtgagcgctgcgggcgcggcgcggggctttgtgcgctccgcgtgtgcgcgaggggagcgcggccgggggcggtgccccgcggtgcgggggggctgcgaggggaacaaaggctgcgtgcggggtgtgtgcgtgggggggtgagcagggggtgtgggcgcggcggtcgggctgtaacccccccctgcacccccctccccgagttgctgagcacggcccggcttcgggtgcggggctccgtgcggggcgtggcgcggggctcgccgtgccgggcggggggtggcggcaggtgggggtgccgggcggggcggggccgcctcgggccggggagggctcgggggaggggcgcggcggcccccggagcgccggcggaaacagattggaaatgatttgttttgagcgggggttgagaatcctgatggagcgggtttgtcataaaccccgctccctcaggattcccaacctcctctcatttgctatattcaattaagtaatctagagcctctgctaaccatgttcatgccttcttctttttcctacagctcctgggcaacgtgctggttattgtgaccggtcgctagccaccatggtgagcaagggcgaggagctgttcaccggggtggtgcccatcctggtcgagctggacggcgacgtaaacggccacaagttcagcgtgtccggcgagggcgagggcgatgccacctacggcaagctgaccctgaagttcatctgcaccaccggcaagctgcccgtgccctggcccaccctcgtgaccaccctgacctacggcgtgcagtgcttcagccgctaccccgaccacatgaagcagcacgacttcttcaagtccgccatgcccgaaggctacgtccaggagcgcaccatcttcttcaaggacgacggcaactacaagacccgcgccgaggtgaagttcgagggcgacaccctggtgaaccgcatcgagctgaagggcatcgacttcaaggaggacggcaacatcctggggcacaagctggagtacaactacaacagccacaacgtctatatcatggccgacaagcagaagaacggcatcaaggtgaacttcaagatccgccacaacatcgaggacggcagcgtgcagctcgccgaccactaccagcagaacacccccatcggcgacggccccgtgctgctgcccgacaaccactacctgagcacccagtccgccctgagcaaagaccccaacgagaagcgcgatcacatggtcctgctggagttcgtgaccgccgccgggatcactctcggcatggacgagctgtacaagtaacctgcaggcgccggcggaaacagattggaaatgatttgttttgagcgggggttgagaatcctgatggagcgggtttgtcataaaccccgctccctcaggattcccaacctcctctcatttgctatattcaattaagtaagagctcgctgatcagcctcgactgtgccttctagttgccagccatctgttgtttgcccctcccccgtgccttccttgaccctggaaggtgccactcccactgtcctttcctaataaaatgaggaaattgcatcgcattgtctgagtaggtgtcattctattctggggggtggggtggggcaggacagcaagggggaggattgggaagacaatagcaggcatgctggggatgcggtgggctctatggaagcttgaattcagctgacgtgcctcggaccgctaggaacccctagtgatggagttggccactccctctctgcgcgctcgctcgctcactgaggccgggcgaccaaaggtcgcccgacgcccgggctttgcccgggcggcctcagtgagcgagcgagcgcgcag

SEQ ID NO: 244 - DNA, 2901 bp, synthetic construct
  misc_feature 1..2901: note = Description of Artificial Sequence: Syntheticpolynucleotide
  source 1..2901: mol_type = other DNA
cctgcaggcagctgcgcgctcgctcgctcactgaggccgcccgggcgtcgggcgacctttggtcgcccggcctcagtgagcgagcgagcgcgcagagagggagtggccaactccatcactaggggttcctgcggccgcacgcgtgacattgattattgactagttattaatagtaatcaattacggggtcattagttcatagcccatatatggagttccgcgttacataacttacggtaaatggcccgcctggctgaccgcccaacgacccccgcccattgacgtcaataatgacgtatgttcccatagtaacgccaatagggactttccattgacgtcaatgggtggactatttacggtaaactgcccacttggcagtacatcaagtgtatcatatgccaagtacgccccctattgacgtcaatgacggtaaatggcccgcctggcattatgcccagtacatgaccttatgggactttcctacttggcagtacatctacgtattagtcatcgctattaccatgggtcgaggtgagccccacgttctgcttcactctccccatctcccccccctccccacccccaattttgtatttatttattttttaattattttgtgcagcgatgggggcggggggggggggggcgcgcgccaggcggggcggggcggggcgaggggcggggcggggcgaggcggagaggtgcggcggcagccaatcagagcggcgcgctccgaaagtttccttttatggcgaggcggcggcggcggcggccctataaaaagcgaagcgcgcggcgggcgggagtcgctgcgttgccttcgccccgtgccccgctccgcgccgcctcgcgccgcccgccccggctctgactgaccgcgttactcccacaggtgagcgggcgggacggcccttctcctccgggctgtaattagcgcttggtttaatgacggctcgtttcttttctgtggctgcgtgaaagccttaaagggctccgggagggccctttgtgcgggggggagcggctcggggggtgcgtgcgtgtgtgtgtgcgtggggagcgccgcgtgcggcccgcgctgcccggcggctgtgagcgctgcgggcgcggcgcggggctttgtgcgctccgcgtgtgcgcgaggggagcgcggccgggggcggtgccccgcggtgcgggggggctgcgaggggaacaaaggctgcgtgcggggtgtgtgcgtgggggggtgagcagggggtgtgggcgcggcggtcgggctgtaacccccccctgcacccccctccccgagttgctgagcacggcccggcttcgggtgcggggctccgtgcggggcgtggcgcggggctcgccgtgccgggcggggggtggcggcaggtgggggtgccgggcggggcggggccgcctcgggccggggagggctcgggggaggggcgcggcggcccccggagcgccggcgtgactgccagggcacttgggaatggcaaggttgagaatcctgatggagcggattccatcaggattctcagtcttgctatacccagaaaacgtgccaggaagatctagagcctctgctaaccatgttcatgccttcttctttttcctacagctcctgggcaacgtgctggttattgtgaccggtcgctagccaccatggtgagcaagggcgaggagctgttcaccggggtggtgcccatcctggtcgagctggacggcgacgtaaacggccacaagttcagcgtgtccggcgagggcgagggcgatgccacctacggcaagctgaccctgaagttcatctgcaccaccggcaagctgcccgtgccctggcccaccctcgtgaccaccctgacctacggcgtgcagtgcttcagccgctaccccgaccacatgaagcagcacgacttcttcaagtccgccatgcccgaaggctacgtccaggagcgcaccatcttcttcaaggacgacggcaactacaagacccgcgccgaggtgaagttcgagggcgacaccctggtgaaccgcatcgagctgaagggcatcgacttcaaggaggacggcaacatcctggggcacaagctggagtacaactacaacagccacaacgtctatatcatggccgacaagcagaagaacggcatcaaggtgaacttcaagatccgccacaacatcgaggacggcagcgtgcagctcgccgaccactaccagcagaacacccccatcggcgacggccccgtgctgctgcccgacaaccactacctgagcacccagtccgccctgagcaaagaccccaacgagaagcgcgatcacatggtcctgctggagttcgtgaccgccgccgggatcactctcggcatggacgagctgtacaagtaacctgcaggcgccggcgtgactgccagggcacttgggaatggcaaggttgagaatcctgatggagcggattccatcaggattctcagtcttgctatacccagaaaacgtgccaggaagagagctcgctgatcagcctcgactgtgccttctagttgccagccatctgttgtttgcccctcccccgtgccttccttgaccctggaaggtgccactcccactgtcctttcctaataaaatgaggaaattgcatcgcattgtctgagtaggtgtcattctattctggggggtggggtggggcaggacagcaagggggaggattgggaagacaatagcaggcatgctggggatgcggtgggctctatggaagcttgaattcagctgacgtgcctcggaccgctaggaacccctagtgatggagttggccactccctctctgcgcgctcgctcgctcactgaggccgggcgaccaaaggtcgcccgacgcccgggctttgcccgggcggcctcagtgagcgagcgagcgcgcag

SEQ ID NO: 245 - DNA, 2978 bp, synthetic construct
  misc_feature 1..2978: note = Description of Artificial Sequence: Syntheticpolynucleotide
  source 1..2978: mol_type = other DNA
ctgcgcgctcgctcgctcactgaggccgcccgggcgtcgggcgacctttggtcgcccggcctcagtgagcgagcgagcgcgcagagagggagtggccaactccatcactaggggttcctgcggccgcacgcgtgacattgattattgactagttattaatagtaatcaattacggggtcattagttcatagcccatatatggagttccgcgttacataacttacggtaaatggcccgcctggctgaccgcccaacgacccccgcccattgacgtcaataatgacgtatgttcccatagtaacgccaatagggactttccattgacgtcaatgggtggactatttacggtaaactgcccacttggcagtacatcaagtgtatcatatgccaagtacgccccctattgacgtcaatgacggtaaatggcccgcctggcattatgcccagtacatgaccttatgggactttcctacttggcagtacatctacgtattagtcatcgctattaccatgggtcgaggtgagccccacgttctgcttcactctccccatctcccccccctccccacccccaattttgtatttatttattttttaattattttgtgcagcgatgggggcggggggggggggggcgcgcgccaggcggggcggggcggggcgaggggcggggcggggcgaggcggagaggtgcggcggcagccaatcagagcggcgcgctccgaaagtttccttttatggcgaggcggcggcggcggcggccctataaaaagcgaagcgcgcggcgggcgggagtcgctgcgttgccttcgccccgtgccccgctccgcgccgcctcgcgccgcccgccccggctctgactgaccgcgttactcccacaggtgagcgggcgggacggcccttctcctccgggctgtaattagcgcttggtttaatgacggctcgtttcttttctgtggctgcgtgaaagccttaaagggctccgggagggccctttgtgcgggggggagcggctcggggggtgcgtgcgtgtgtgtgtgcgtggggagcgccgcgtgcggcccgcgctgcccggcggctgtgagcgctgcgggcgcggcgcggggctttgtgcgctccgcgtgtgcgcgaggggagcgcggccgggggcggtgccccgcggtgcgggggggctgcgaggggaacaaaggctgcgtgcggggtgtgtgcgtgggggggtgagcagggggtgtgggcgcggcggtcgggctgtaacccccccctgcacccccctccccgagttgctgagcacggcccggcttcgggtgcggggctccgtgcggggcgtggcgcggggctcgccgtgccgggcggggggtggcggcaggtgggggtgccgggcggggcggggccgcctcgggccggggagggctcgggggaggggcgcggcggcccccggagcgccggcggagcaggaggaccaaggccctggcgaaggccgtggcctcgatgctgtcatagtaataccagtgtgcaggtcccaatggctggtattaatgtgacagtctcggggacgcgggcctggacgccggcatccgggctcaggacccccctctctagagcctctgctaaccatgttcatgccttcttctttttcctacagctcctgggcaacgtgctggttattgtgaccggtcgctagccaccatggtgagcaagggcgaggagctgttcaccggggtggtgcccatcctggtcgagctggacggcgacgtaaacggccacaagttcagcgtgtccggcgagggcgagggcgatgccacctacggcaagctgaccctgaagttcatctgcaccaccggcaagctgcccgtgccctggcccaccctcgtgaccaccctgacctacggcgtgcagtgcttcagccgctaccccgaccacatgaagcagcacgacttcttcaagtccgccatgcccgaaggctacgtccaggagcgcaccatcttcttcaaggacgacggcaactacaagacccgcgccgaggtgaagttcgagggcgacaccctggtgaaccgcatcgagctgaagggcatcgacttcaaggaggacggcaacatcctggggcacaagctggagtacaactacaacagccacaacgtctatatcatggccgacaagcagaagaacggcatcaaggtgaacttcaagatccgccacaacatcgaggacggcagcgtgcagctcgccgaccactaccagcagaacacccccatcggcgacggccccgtgctgctgcccgacaaccactacctgagcacccagtccgccctgagcaaagaccccaacgagaagcgcgatcacatggtcctgctggagttcgtgaccgccgccgggatcactctcggcatggacgagctgtacaagtaacctgcaggcgccggcggagcaggaggaccaaggccctggcgaaggccgtggcctcgatgctgtcatagtaataccagtgtgcaggtcccaatggctggtattaatgtgacagtctcggggacgcgggcctggacgccggcatccgggctcaggacccccctcgagctcgctgatcagcctcgactgtgccttctagttgccagccatctgttgtttgcccctcccccgtgccttccttgaccctggaaggtgccactcccactgtcctttcctaataaaatgaggaaattgcatcgcattgtctgagtaggtgtcattctattctggggggtggggtggggcaggacagcaagggggaggattgggaagacaatagcaggcatgctggggatgcggtgggctctatggaagcttgaattcagctgacgtgcctcggaccgctaggaacccctagtgatggagttggccactccctctctgcgcgctcgctcgctcactgaggccgggcgaccaaaggtcgcccgacgcccgggctttgcccgggcggcctcagtgagcgagcgagcgcgcag

SEQ ID NO: 246 - DNA, 4346 bp, synthetic construct
  misc_feature 1..4346: note = Description of Artificial Sequence: Syntheticpolynucleotide
  source 1..4346: mol_type = other DNA
ctgcgcgctcgctcgctcactgaggccgcccgggcgtcgggcgacctttggtcgcccggcctcagtgagcgagcgagcgcgcagagagggagtggccaactccatcactaggggttcctgcggccgcacgcgtgacattgattattgactagttattaatagtaatcaattacggggtcattagttcatagcccatatatggagttccgcgttacataacttacggtaaatggcccgcctggctgaccgcccaacgacccccgcccattgacgtcaataatgacgtatgttcccatagtaacgccaatagggactttccattgacgtcaatgggtggactatttacggtaaactgcccacttggcagtacatcaagtgtatcatatgccaagtacgccccctattgacgtcaatgacggtaaatggcccgcctggcattatgcccagtacatgaccttatgggactttcctacttggcagtacatctacgtattagtcatcgctattaccatgggtcgaggtgagccccacgttctgcttcactctccccatctcccccccctccccacccccaattttgtatttatttattttttaattattttgtgcagcgatgggggcggggggggggggggcgcgcgccaggcggggcggggcggggcgaggggcggggcggggcgaggcggagaggtgcggcggcagccaatcagagcggcgcgctccgaaagtttccttttatggcgaggcggcggcggcggcggccctataaaaagcgaagcgcgcggcgggcgggagtcgctgcgttgccttcgccccgtgccccgctccgcgccgcctcgcgccgcccgccccggctctgactgaccgcgttactcccacaggtgagcgggcgggacggcccttctcctccgggctgtaattagcgcttggtttaatgacggctcgtttcttttctgtggctgcgtgaaagccttaaagggctccgggagggccctttgtgcgggggggagcggctcggggggtgcgtgcgtgtgtgtgtgcgtggggagcgccgcgtgcggcccgcgctgcccggcggctgtgagcgctgcgggcgcggcgcggggctttgtgcgctccgcgtgtgcgcgaggggagcgcggccgggggcggtgccccgcggtgcgggggggctgcgaggggaacaaaggctgcgtgcggggtgtgtgcgtgggggggtgagcagggggtgtgggcgcggcggtcgggctgtaacccccccctgcacccccctccccgagttgctgagcacggcccggcttcgggtgcggggctccgtgcggggcgtggcgcggggctcgccgtgccgggcggggggtggcggcaggtgggggtgccgggcggggcggggccgcctcgggccggggagggctcgggggaggggcgcggcggcccccggagcgccggcggagcaggaggaccaaggccctggcgaaggccgtggcctcgatgctgtcatagtaataccagtgtgcaggtcccaatggctggtattaatgtgacagtctcggggacgcgggcctggacgccggcatccgggctcaggacccccctctctagagcctctgctaaccatgttcatgccttcttctttttcctacagctcctgggcaacgtgctggttattgtgaccggtcgctagccaccatggctgaagcccctcctagaaggcttggactgggacctcctcctggggatgctcctagagctgaactggtggctctgacagccgtgcagtctgaacaaggcgaagctggtggcggcggatctccacgtagacttggactgctgggaagccctcttcctcctggtgctccacttcctggacctggcagtggatctggatctgcctgtggccagagaagctctgccgctcacaagagataccggcggctgcagaactgggtgtacaacgtgctggaaagacccagaggctgggccttcgtgtaccacgtgttcatctttctgctggtgttcagctgcctggtgctgtccgtgctgagcaccatccaagaacatcaagagctggctaacgagtgcctgttaatactggagtttgtgatgattgtggtgttcggcctcgagtacatcgtccgcgtttggagcgccggctgctgctgcagatatagaggttggcaaggcagattccgcttcgccagaaagcccttctgcgtgatcgacttcatcgtgttcgtggccagcgtggccgtgattgctgctggcacacagggcaacatcttcgccacaagcgccctgcggagcatgcggtttctgcagatcctgagaatggtccgaatggacagaagaggcggcacctggaagctgctgggctctgtggtgtacgcccacagcaaagagctgatcaccgcctggtacatcggatttctggtgctgatcttcgcctccttcctggtgtacctggccgagaaggacgccaacagcgactttagcagctacgccgactctctttggtggggcaccatcacactgaccaccatcggctacggcgacaagacccctcacacatggctgggaagagtgctggccgctggatttgctctgctgggcatcagctttttcgccctgcctgccggaatcctcggatctggctttgccctgaaggtgcaagagcagcatagacaaaagcattttgaaaagagaagaatgcctgccgccaacctgattcaggccgcttggagactgtacagcaccgacatgagcagagcctacctgaccgccacgtggtattattacgattcgatcctgcctagcttccgcgaactggccctgctgtttgagcatgtgcagagagccagaaacggcggcctcagacctctggaagttcggagagcacctgtgcctgatggcgccccttctagatatcctccagtggccacctgtcacagacccggcagcacatctttttgccctggcgagtctagccggatgggcatcaaggacagaatcagaatgggcagcagccagcggagaacaggcccttctaaacagcatctggcccctccaaccatgcctacaagccctagctctgagcaagtgggcgaagccacctctcctaccaaggtgcagaagtcctggtccttcaacgaccggaccagatttagagccagcctccggctgaagcccagaacctctgccgaggatgccccttctgaagaggtggccgaagagaagtcctaccagtgcgagctgaccgtggacgacatcatgccagccgtgaaaaccgtgataaggtctatacgcatcctgaagttcctggtggccaagcggaagttcaaagagacactgcggccctacgacgtgaaggacgtgatcgagcagtattctgccggccacctggacatgctgggcagaatcaagagcctgcagaccagagtggaccagatcgttggaagaggcccaggcgacagaaaggccagagagaagggcgataagggcccatctgatgccgaggttgtcgacgagatatcaatgatgggcagagtcgtgaaagtcgaaaaacaggtgcagagcatcgagcacaagctggacctgctgctgggattctacagccggtgtctgagaagcggcacatctgcatctctgggcgctgtgcaggtcccactgttcgatcctgatattacgagcgattatcacagccccgtggaccacgaggacatctccgtttctgctcagaccctgagcatcagcagatccgtgtccaccaacatggactaacctgcaggcgccggcggagcaggaggaccaaggccctggcgaaggccgtggcctcgatgctgtcatagtaataccagtgtgcaggtcccaatggctggtattaatgtgacagtctcggggacgcgggcctggacgccggcatccgggctcaggacccccctcgagctcgctgatcagcctcgactgtgccttctagttgccagccatctgttgtttgcccctcccccgtgccttccttgaccctggaaggtgccactcccactgtcctttcctaataaaatgaggaaattgcatcgcattgtctgagtaggtgtcattctattctggggggtggggtggggcaggacagcaagggggaggattgggaagacaatagcaggcatgctggggatgcggtgggctctatggaagcttgaattcagctgacgtgcctcggaccgctaggaacccctagtgatggagttggccactccctctctgcgcgctcgctcgctcactgaggccgggcgaccaaaggtcgcccgacgcccgggctttgcccgggcggcctcagtgagcgagcgagcgcgcag

SEQ ID NO: 247 - DNA, 2978 bp, synthetic construct
  misc_feature 1..2978: note = Description of Artificial Sequence: Syntheticpolynucleotide
  source 1..2978: mol_type = other DNA
ctgcgcgctcgctcgctcactgaggccgcccgggcgtcgggcgacctttggtcgcccggcctcagtgagcgagcgagcgcgcagagagggagtggccaactccatcactaggggttcctgcggccgcacgcgtgacattgattattgactagttattaatagtaatcaattacggggtcattagttcatagcccatatatggagttccgcgttacataacttacggtaaatggcccgcctggctgaccgcccaacgacccccgcccattgacgtcaataatgacgtatgttcccatagtaacgccaatagggactttccattgacgtcaatgggtggactatttacggtaaactgcccacttggcagtacatcaagtgtatcatatgccaagtacgccccctattgacgtcaatgacggtaaatggcccgcctggcattatgcccagtacatgaccttatgggactttcctacttggcagtacatctacgtattagtcatcgctattaccatgggtcgaggtgagccccacgttctgcttcactctccccatctcccccccctccccacccccaattttgtatttatttattttttaattattttgtgcagcgatgggggcggggggggggggggcgcgcgccaggcggggcggggcggggcgaggggcggggcggggcgaggcggagaggtgcggcggcagccaatcagagcggcgcgctccgaaagtttccttttatggcgaggcggcggcggcggcggccctataaaaagcgaagcgcgcggcgggcgggagtcgctgcgttgccttcgccccgtgccccgctccgcgccgcctcgcgccgcccgccccggctctgactgaccgcgttactcccacaggtgagcgggcgggacggcccttctcctccgggctgtaattagcgcttggtttaatgacggctcgtttcttttctgtggctgcgtgaaagccttaaagggctccgggagggccctttgtgcgggggggagcggctcggggggtgcgtgcgtgtgtgtgtgcgtggggagcgccgcgtgcggcccgcgctgcccggcggctgtgagcgctgcgggcgcggcgcggggctttgtgcgctccgcgtgtgcgcgaggggagcgcggccgggggcggtgccccgcggtgcgggggggctgcgaggggaacaaaggctgcgtgcggggtgtgtgcgtgggggggtgagcagggggtgtgggcgcggcggtcgggctgtaacccccccctgcacccccctccccgagttgctgagcacggcccggcttcgggtgcggggctccgtgcggggcgtggcgcggggctcgccgtgccgggcggggggtggcggcaggtgggggtgccgggcggggcggggccgcctcgggccggggagggctcgggggaggggcgcggcggcccccggagcgccggcggagcaggaggaccaaggccctggcgaaggccgtggcctcgttgagtcttagagaggcccggtgtgcaggtcccaatggccgggtcttactgagattccacggggacgcgggcctggacgccggcatccgggctcaggacccccctctctagagcctctgctaaccatgttcatgccttcttctttttcctacagctcctgggcaacgtgctggttattgtgaccggtcgctagccaccatggtgagcaagggcgaggagctgttcaccggggtggtgcccatcctggtcgagctggacggcgacgtaaacggccacaagttcagcgtgtccggcgagggcgagggcgatgccacctacggcaagctgaccctgaagttcatctgcaccaccggcaagctgcccgtgccctggcccaccctcgtgaccaccctgacctacggcgtgcagtgcttcagccgctaccccgaccacatgaagcagcacgacttcttcaagtccgccatgcccgaaggctacgtccaggagcgcaccatcttcttcaaggacgacggcaactacaagacccgcgccgaggtgaagttcgagggcgacaccctggtgaaccgcatcgagctgaagggcatcgacttcaaggaggacggcaacatcctggggcacaagctggagtacaactacaacagccacaacgtctatatcatggccgacaagcagaagaacggcatcaaggtgaacttcaagatccgccacaacatcgaggacggcagcgtgcagctcgccgaccactaccagcagaacacccccatcggcgacggccccgtgctgctgcccgacaaccactacctgagcacccagtccgccctgagcaaagaccccaacgagaagcgcgatcacatggtcctgctggagttcgtgaccgccgccgggatcactctcggcatggacgagctgtacaagtaacctgcaggcgccggcggagcaggaggaccaaggccctggcgaaggccgtggcctcgatgctgtcatagtaataccagtgtgcaggtcccaatggctggtattaatgtgacagtctcggggacgcgggcctggacgccggcatccgggctcaggacccccctcgagctcgctgatcagcctcgactgtgccttctagttgccagccatctgttgtttgcccctcccccgtgccttccttgaccctggaaggtgccactcccactgtcctttcctaataaaatgaggaaattgcatcgcattgtctgagtaggtgtcattctattctggggggtggggtggggcaggacagcaagggggaggattgggaagacaatagcaggcatgctggggatgcggtgggctctatggaagcttgaattcagctgacgtgcctcggaccgctaggaacccctagtgatggagttggccactccctctctgcgcgctcgctcgctcactgaggccgggcgaccaaaggtcgcccgacgcccgggctttgcccgggcggcctcagtgagcgagcgagcgcgcag

SEQ ID NO: 248 - DNA, 4346 bp, synthetic construct
  misc_feature 1..4346: note = Description of Artificial Sequence: Syntheticpolynucleotide
  source 1..4346: mol_type = other DNA
ctgcgcgctcgctcgctcactgaggccgcccgggcgtcgggcgacctttggtcgcccggcctcagtgagcgagcgagcgcgcagagagggagtggccaactccatcactaggggttcctgcggccgcacgcgtgacattgattattgactagttattaatagtaatcaattacggggtcattagttcatagcccatatatggagttccgcgttacataacttacggtaaatggcccgcctggctgaccgcccaacgacccccgcccattgacgtcaataatgacgtatgttcccatagtaacgccaatagggactttccattgacgtcaatgggtggactatttacggtaaactgcccacttggcagtacatcaagtgtatcatatgccaagtacgccccctattgacgtcaatgacggtaaatggcccgcctggcattatgcccagtacatgaccttatgggactttcctacttggcagtacatctacgtattagtcatcgctattaccatgggtcgaggtgagccccacgttctgcttcactctccccatctcccccccctccccacccccaattttgtatttatttattttttaattattttgtgcagcgatgggggcggggggggggggggcgcgcgccaggcggggcggggcggggcgaggggcggggcggggcgaggcggagaggtgcggcggcagccaatcagagcggcgcgctccgaaagtttccttttatggcgaggcggcggcggcggcggccctataaaaagcgaagcgcgcggcgggcgggagtcgctgcgttgccttcgccccgtgccccgctccgcgccgcctcgcgccgcccgccccggctctgactgaccgcgttactcccacaggtgagcgggcgggacggcccttctcctccgggctgtaattagcgcttggtttaatgacggctcgtttcttttctgtggctgcgtgaaagccttaaagggctccgggagggccctttgtgcgggggggagcggctcggggggtgcgtgcgtgtgtgtgtgcgtggggagcgccgcgtgcggcccgcgctgcccggcggctgtgagcgctgcgggcgcggcgcggggctttgtgcgctccgcgtgtgcgcgaggggagcgcggccgggggcggtgccccgcggtgcgggggggctgcgaggggaacaaaggctgcgtgcggggtgtgtgcgtgggggggtgagcagggggtgtgggcgcggcggtcgggctgtaacccccccctgcacccccctccccgagttgctgagcacggcccggcttcgggtgcggggctccgtgcggggcgtggcgcggggctcgccgtgccgggcggggggtggcggcaggtgggggtgccgggcggggcggggccgcctcgggccggggagggctcgggggaggggcgcggcggcccccggagcgccggcggagcaggaggaccaaggccctggcgaaggccgtggcctcgttgagtcttagagaggcccggtgtgcaggtcccaatggccgggtcttactgagattccacggggacgcgggcctggacgccggcatccgggctcaggacccccctctctagagcctctgctaaccatgttcatgccttcttctttttcctacagctcctgggcaacgtgctggttattgtgaccggtcgctagccaccatggctgaagcccctcctagaaggcttggactgggacctcctcctggggatgctcctagagctgaactggtggctctgacagccgtgcagtctgaacaaggcgaagctggtggcggcggatctccacgtagacttggactgctgggaagccctcttcctcctggtgctccacttcctggacctggcagtggatctggatctgcctgtggccagagaagctctgccgctcacaagagataccggcggctgcagaactgggtgtacaacgtgctggaaagacccagaggctgggccttcgtgtaccacgtgttcatctttctgctggtgttcagctgcctggtgctgtccgtgctgagcaccatccaagaacatcaagagctggctaacgagtgcctgttaatactggagtttgtgatgattgtggtgttcggcctcgagtacatcgtccgcgtttggagcgccggctgctgctgcagatatagaggttggcaaggcagattccgcttcgccagaaagcccttctgcgtgatcgacttcatcgtgttcgtggccagcgtggccgtgattgctgctggcacacagggcaacatcttcgccacaagcgccctgcggagcatgcggtttctgcagatcctgagaatggtccgaatggacagaagaggcggcacctggaagctgctgggctctgtggtgtacgcccacagcaaagagctgatcaccgcctggtacatcggatttctggtgctgatcttcgcctccttcctggtgtacctggccgagaaggacgccaacagcgactttagcagctacgccgactctctttggtggggcaccatcacactgaccaccatcggctacggcgacaagacccctcacacatggctgggaagagtgctggccgctggatttgctctgctgggcatcagctttttcgccctgcctgccggaatcctcggatctggctttgccctgaaggtgcaagagcagcatagacaaaagcattttgaaaagagaagaatgcctgccgccaacctgattcaggccgcttggagactgtacagcaccgacatgagcagagcctacctgaccgccacgtggtattattacgattcgatcctgcctagcttccgcgaactggccctgctgtttgagcatgtgcagagagccagaaacggcggcctcagacctctggaagttcggagagcacctgtgcctgatggcgccccttctagatatcctccagtggccacctgtcacagacccggcagcacatctttttgccctggcgagtctagccggatgggcatcaaggacagaatcagaatgggcagcagccagcggagaacaggcccttctaaacagcatctggcccctccaaccatgcctacaagccctagctctgagcaagtgggcgaagccacctctcctaccaaggtgcagaagtcctggtccttcaacgaccggaccagatttagagccagcctccggctgaagcccagaacctctgccgaggatgccccttctgaagaggtggccgaagagaagtcctaccagtgcgagctgaccgtggacgacatcatgccagccgtgaaaaccgtgataaggtctatacgcatcctgaagttcctggtggccaagcggaagttcaaagagacactgcggccctacgacgtgaaggacgtgatcgagcagtattctgccggccacctggacatgctgggcagaatcaagagcctgcagaccagagtggaccagatcgttggaagaggcccaggcgacagaaaggccagagagaagggcgataagggcccatctgatgccgaggttgtcgacgagatatcaatgatgggcagagtcgtgaaagtcgaaaaacaggtgcagagcatcgagcacaagctggacctgctgctgggattctacagccggtgtctgagaagcggcacatctgcatctctgggcgctgtgcaggtcccactgttcgatcctgatattacgagcgattatcacagccccgtggaccacgaggacatctccgtttctgctcagaccctgagcatcagcagatccgtgtccaccaacatggactaacctgcaggcgccggcggagcaggaggaccaaggccctggcgaaggccgtggcctcgatgctgtcatagtaataccagtgtgcaggtcccaatggctggtattaatgtgacagtctcggggacgcgggcctggacgccggcatccgggctcaggacccccctcgagctcgctgatcagcctcgactgtgccttctagttgccagccatctgttgtttgcccctcccccgtgccttccttgaccctggaaggtgccactcccactgtcctttcctaataaaatgaggaaattgcatcgcattgtctgagtaggtgtcattctattctggggggtggggtggggcaggacagcaagggggaggattgggaagacaatagcaggcatgctggggatgcggtgggctctatggaagcttgaattcagctgacgtgcctcggaccgctaggaacccctagtgatggagttggccactccctctctgcgcgctcgctcgctcactgaggccgggcgaccaaaggtcgcccgacgcccgggctttgcccgggcggcctcagtgagcgagcgagcgcgcag

SEQ ID NO: 249 - DNA, 2978 bp, synthetic construct
  misc_feature 1..2978: note = Description of Artificial Sequence: Syntheticpolynucleotide
  source 1..2978: mol_type = other DNA
ctgcgcgctcgctcgctcactgaggccgcccgggcgtcgggcgacctttggtcgcccggcctcagtgagcgagcgagcgcgcagagagggagtggccaactccatcactaggggttcctgcggccgcacgcgtgacattgattattgactagttattaatagtaatcaattacggggtcattagttcatagcccatatatggagttccgcgttacataacttacggtaaatggcccgcctggctgaccgcccaacgacccccgcccattgacgtcaataatgacgtatgttcccatagtaacgccaatagggactttccattgacgtcaatgggtggactatttacggtaaactgcccacttggcagtacatcaagtgtatcatatgccaagtacgccccctattgacgtcaatgacggtaaatggcccgcctggcattatgcccagtacatgaccttatgggactttcctacttggcagtacatctacgtattagtcatcgctattaccatgggtcgaggtgagccccacgttctgcttcactctccccatctcccccccctccccacccccaattttgtatttatttattttttaattattttgtgcagcgatgggggcggggggggggggggcgcgcgccaggcggggcggggcggggcgaggggcggggcggggcgaggcggagaggtgcggcggcagccaatcagagcggcgcgctccgaaagtttccttttatggcgaggcggcggcggcggcggccctataaaaagcgaagcgcgcggcgggcgggagtcgctgcgttgccttcgccccgtgccccgctccgcgccgcctcgcgccgcccgccccggctctgactgaccgcgttactcccacaggtgagcgggcgggacggcccttctcctccgggctgtaattagcgcttggtttaatgacggctcgtttcttttctgtggctgcgtgaaagccttaaagggctccgggagggccctttgtgcgggggggagcggctcggggggtgcgtgcgtgtgtgtgtgcgtggggagcgccgcgtgcggcccgcgctgcccggcggctgtgagcgctgcgggcgcggcgcggggctttgtgcgctccgcgtgtgcgcgaggggagcgcggccgggggcggtgccccgcggtgcgggggggctgcgaggggaacaaaggctgcgtgcggggtgtgtgcgtgggggggtgagcagggggtgtgggcgcggcggtcgggctgtaacccccccctgcacccccctccccgagttgctgagcacggcccggcttcgggtgcggggctccgtgcggggcgtggcgcggggctcgccgtgccgggcggggggtggcggcaggtgggggtgccgggcggggcggggccgcctcgggccggggagggctcgggggaggggcgcggcggcccccggagcgccggcggagcaggaggaccaaggccctggcgaaggccgtggcctcgttttccaccttgactacgcgctgtgcaggtcccaatgggcgtgtagtagaggtggagcacggggacgcgggcctggacgccggcatccgggctcaggacccccctctctagagcctctgctaaccatgttcatgccttcttctttttcctacagctcctgggcaacgtgctggttattgtgaccggtcgctagccaccatggtgagcaagggcgaggagctgttcaccggggtggtgcccatcctggtcgagctggacggcgacgtaaacggccacaagttcagcgtgtccggcgagggcgagggcgatgccacctacggcaagctgaccctgaagttcatctgcaccaccggcaagctgcccgtgccctggcccaccctcgtgaccaccctgacctacggcgtgcagtgcttcagccgctaccccgaccacatgaagcagcacgacttcttcaagtccgccatgcccgaaggctacgtccaggagcgcaccatcttcttcaaggacgacggcaactacaagacccgcgccgaggtgaagttcgagggcgacaccctggtgaaccgcatcgagctgaagggcatcgacttcaaggaggacggcaacatcctggggcacaagctggagtacaactacaacagccacaacgtctatatcatggccgacaagcagaagaacggcatcaaggtgaacttcaagatccgccacaacatcgaggacggcagcgtgcagctcgccgaccactaccagcagaacacccccatcggcgacggccccgtgctgctgcccgacaaccactacctgagcacccagtccgccctgagcaaagaccccaacgagaagcgcgatcacatggtcctgctggagttcgtgaccgccgccgggatcactctcggcatggacgagctgtacaagtaacctgcaggcgccggcggagcaggaggaccaaggccctggcgaaggccgtggcctcgatgctgtcatagtaataccagtgtgcaggtcccaatggctggtattaatgtgacagtctcggggacgcgggcctggacgccggcatccgggctcaggacccccctcgagctcgctgatcagcctcgactgtgccttctagttgccagccatctgttgtttgcccctcccccgtgccttccttgaccctggaaggtgccactcccactgtcctttcctaataaaatgaggaaattgcatcgcattgtctgagtaggtgtcattctattctggggggtggggtggggcaggacagcaagggggaggattgggaagacaatagcaggcatgctggggatgcggtgggctctatggaagcttgaattcagctgacgtgcctcggaccgctaggaacccctagtgatggagttggccactccctctctgcgcgctcgctcgctcactgaggccgggcgaccaaaggtcgcccgacgcccgggctttgcccgggcggcctcagtgagcgagcgagcgcgcag

SEQ ID NO: 250 - DNA, 4346 bp, synthetic construct
  misc_feature 1..4346: note = Description of Artificial Sequence: Syntheticpolynucleotide
  source 1..4346: mol_type = other DNA
ctgcgcgctcgctcgctcactgaggccgcccgggcgtcgggcgacctttggtcgcccggcctcagtgagcgagcgagcgcgcagagagggagtggccaactccatcactaggggttcctgcggccgcacgcgtgacattgattattgactagttattaatagtaatcaattacggggtcattagttcatagcccatatatggagttccgcgttacataacttacggtaaatggcccgcctggctgaccgcccaacgacccccgcccattgacgtcaataatgacgtatgttcccatagtaacgccaatagggactttccattgacgtcaatgggtggactatttacggtaaactgcccacttggcagtacatcaagtgtatcatatgccaagtacgccccctattgacgtcaatgacggtaaatggcccgcctggcattatgcccagtacatgaccttatgggactttcctacttggcagtacatctacgtattagtcatcgctattaccatgggtcgaggtgagccccacgttctgcttcactctccccatctcccccccctccccacccccaattttgtatttatttattttttaattattttgtgcagcgatgggggcggggggggggggggcgcgcgccaggcggggcggggcggggcgaggggcggggcggggcgaggcggagaggtgcggcggcagccaatcagagcggcgcgctccgaaagtttccttttatggcgaggcggcggcggcggcggccctataaaaagcgaagcgcgcggcgggcgggagtcgctgcgttgccttcgccccgtgccccgctccgcgccgcctcgcgccgcccgccccggctctgactgaccgcgttactcccacaggtgagcgggcgggacggcccttctcctccgggctgtaattagcgcttggtttaatgacggctcgtttcttttctgtggctgcgtgaaagccttaaagggctccgggagggccctttgtgcgggggggagcggctcggggggtgcgtgcgtgtgtgtgtgcgtggggagcgccgcgtgcggcccgcgctgcccggcggctgtgagcgctgcgggcgcggcgcggggctttgtgcgctccgcgtgtgcgcgaggggagcgcggccgggggcggtgccccgcggtgcgggggggctgcgaggggaacaaaggctgcgtgcggggtgtgtgcgtgggggggtgagcagggggtgtgggcgcggcggtcgggctgtaacccccccctgcacccccctccccgagttgctgagcacggcccggcttcgggtgcggggctccgtgcggggcgtggcgcggggctcgccgtgccgggcggggggtggcggcaggtgggggtgccgggcggggcggggccgcctcgggccggggagggctcgggggaggggcgcggcggcccccggagcgccggcggagcaggaggaccaaggccctggcgaaggccgtggcctcgttttccaccttgactacgcgctgtgcaggtcccaatgggcgtgtagtagaggtggagcacggggacgcgggcctggacgccggcatccgggctcaggacccccctctctagagcctctgctaaccatgttcatgccttcttctttttcctacagctcctgggcaacgtgctggttattgtgaccggtcgctagccaccatggctgaagcccctcctagaaggcttggactgggacctcctcctggggatgctcctagagctgaactggtggctctgacagccgtgcagtctgaacaaggcgaagctggtggcggcggatctccacgtagacttggactgctgggaagccctcttcctcctggtgctccacttcctggacctggcagtggatctggatctgcctgtggccagagaagctctgccgctcacaagagataccggcggctgcagaactgggtgtacaacgtgctggaaagacccagaggctgggccttcgtgtaccacgtgttcatctttctgctggtgttcagctgcctggtgctgtccgtgctgagcaccatccaagaacatcaagagctggctaacgagtgcctgttaatactggagtttgtgatgattgtggtgttcggcctcgagtacatcgtccgcgtttggagcgccggctgctgctgcagatatagaggttggcaaggcagattccgcttcgccagaaagcccttctgcgtgatcgacttcatcgtgttcgtggccagcgtggccgtgattgctgctggcacacagggcaacatcttcgccacaagcgccctgcggagcatgcggtttctgcagatcctgagaatggtccgaatggacagaagaggcggcacctggaagctgctgggctctgtggtgtacgcccacagcaaagagctgatcaccgcctggtacatcggatttctggtgctgatcttcgcctccttcctggtgtacctggccgagaaggacgccaacagcgactttagcagctacgccgactctctttggtggggcaccatcacactgaccaccatcggctacggcgacaagacccctcacacatggctgggaagagtgctggccgctggatttgctctgctgggcatcagctttttcgccctgcctgccggaatcctcggatctggctttgccctgaaggtgcaagagcagcatagacaaaagcattttgaaaagagaagaatgcctgccgccaacctgattcaggccgcttggagactgtacagcaccgacatgagcagagcctacctgaccgccacgtggtattattacgattcgatcctgcctagcttccgcgaactggccctgctgtttgagcatgtgcagagagccagaaacggcggcctcagacctctggaagttcggagagcacctgtgcctgatggcgccccttctagatatcctccagtggccacctgtcacagacccggcagcacatctttttgccctggcgagtctagccggatgggcatcaaggacagaatcagaatgggcagcagccagcggagaacaggcccttctaaacagcatctggcccctccaaccatgcctacaagccctagctctgagcaagtgggcgaagccacctctcctaccaaggtgcagaagtcctggtccttcaacgaccggaccagatttagagccagcctccggctgaagcccagaacctctgccgaggatgccccttctgaagaggtggccgaagagaagtcctaccagtgcgagctgaccgtggacgacatcatgccagccgtgaaaaccgtgataaggtctatacgcatcctgaagttcctggtggccaagcggaagttcaaagagacactgcggccctacgacgtgaaggacgtgatcgagcagtattctgccggccacctggacatgctgggcagaatcaagagcctgcagaccagagtggaccagatcgttggaagaggcccaggcgacagaaaggccagagagaagggcgataagggcccatctgatgccgaggttgtcgacgagatatcaatgatgggcagagtcgtgaaagtcgaaaaacaggtgcagagcatcgagcacaagctggacctgctgctgggattctacagccggtgtctgagaagcggcacatctgcatctctgggcgctgtgcaggtcccactgttcgatcctgatattacgagcgattatcacagccccgtggaccacgaggacatctccgtttctgctcagaccctgagcatcagcagatccgtgtccaccaacatggactaacctgcaggcgccggcggagcaggaggaccaaggccctggcgaaggccgtggcctcgatgctgtcatagtaataccagtgtgcaggtcccaatggctggtattaatgtgacagtctcggggacgcgggcctggacgccggcatccgggctcaggacccccctcgagctcgctgatcagcctcgactgtgccttctagttgccagccatctgttgtttgcccctcccccgtgccttccttgaccctggaaggtgccactcccactgtcctttcctaataaaatgaggaaattgcatcgcattgtctgagtaggtgtcattctattctggggggtggggtggggcaggacagcaagggggaggattgggaagacaatagcaggcatgctggggatgcggtgggctctatggaagcttgaattcagctgacgtgcctcggaccgctaggaacccctagtgatggagttggccactccctctctgcgcgctcgctcgctcactgaggccgggcgaccaaaggtcgcccgacgcccgggctttgcccgggcggcctcagtgagcgagcgagcgcgcag

SEQ ID NO: 251 - DNA, 3161 bp, synthetic construct
  misc_feature 1..3161: note = Description of Artificial Sequence: Syntheticpolynucleotide
  source 1..3161: mol_type = other DNA
ctgcgcgctcgctcgctcactgaggccgcccgggcgtcgggcgacctttggtcgcccggcctcagtgagcgagcgagcgcgcagagagggagtggccaactccatcactaggggttcctgcggccgcacgcgtgacattgattattgactagttattaatagtaatcaattacggggtcattagttcatagcccatatatggagttccgcgttacataacttacggtaaatggcccgcctggctgaccgcccaacgacccccgcccattgacgtcaataatgacgtatgttcccatagtaacgccaatagggactttccattgacgtcaatgggtggactatttacggtaaactgcccacttggcagtacatcaagtgtatcatatgccaagtacgccccctattgacgtcaatgacggtaaatggcccgcctggcattatgcccagtacatgaccttatgggactttcctacttggcagtacatctacgtattagtcatcgctattaccatgggtcgaggtgagccccacgttctgcttcactctccccatctcccccccctccccacccccaattttgtatttatttattttttaattattttgtgcagcgatgggggcggggggggggggggcgcgcgccaggcggggcggggcggggcgaggggcggggcggggcgaggcggagaggtgcggcggcagccaatcagagcggcgcgctccgaaagtttccttttatggcgaggcggcggcggcggcggccctataaaaagcgaagcgcgcggcgggcgggagtcgctgcgttgccttcgccccgtgccccgctccgcgccgcctcgcgccgcccgccccggctctgactgaccgcgttactcccacaggtgagcgggcgggacggcccttctcctccgggctgtaattagcgcttggtttaatgacggctcgtttcttttctgtggctgcgtgaaagccttaaagggctccgggagggccctttgtgcgggggggagcggctcggggggtgcgtgcgtgtgtgtgtgcgtggggagcgccgcgtgcggcccgcgctgcccggcggctgtgagcgctgcgggcgcggcgcggggctttgtgcgctccgcgtgtgcgcgaggggagcgcggccgggggcggtgccccgcggtgcgggggggctgcgaggggaacaaaggctgcgtgcggggtgtgtgcgtgggggggtgagcagggggtgtgggcgcggcggtcgggctgtaacccccccctgcacccccctccccgagttgctgagcacggcccggcttcgggtgcggggctccgtgcggggcgtggcgcggggctcgccgtgccgggcggggggtggcggcaggtgggggtgccgggcggggcggggccgcctcgggccggggagggctcgggggaggggcgcggcggcccccggagcgccggcggagcaggaggaccaaggccctggcgaaggccgtggcctcgttgagtcttagagaggcccggtgtgcaggtcccaatggccgggtcttactgagattccacggggacgcgggcctggacgccggcatccgggctcaggacccccctctctagagcctctgctaaccatgttcatgccttcttctttttcctacagctcctgggcaacgtgctggttattgtgaccggtcgctagccaccatggtgagcaagggcgaggagctgttcaccggggtggtgcccatcctggtcgagctggacggcgacgtaaacggccacaagttcagcgtgtccggcgagggcgagggcgatgccacctacggcaagctgaccctgaagttcatctgcaccaccggcaagctgcccgtgccctggcccaccctcgtgaccaccctgacctacggcgtgcagtgcttcagccgctaccccgaccacatgaagcagcacgacttcttcaagtccgccatgcccgaaggctacgtccaggagcgcaccatcttcttcaaggacgacggcaactacaagacccgcgccgaggtgaagttcgagggcgacaccctggtgaaccgcatcgagctgaagggcatcgacttcaaggaggacggcaacatcctggggcacaagctggagtacaactacaacagccacaacgtctatatcatggccgacaagcagaagaacggcatcaaggtgaacttcaagatccgccacaacatcgaggacggcagcgtgcagctcgccgaccactaccagcagaacacccccatcggcgacggccccgtgctgctgcccgacaaccactacctgagcacccagtccgccctgagcaaagaccccaacgagaagcgcgatcacatggtcctgctggagttcgtgaccgccgccgggatcactctcggcatggacgagctgtacaagtaacctgcaggcgccggcggagcaggaggaccaaggccctggcgaaggccgtggcctcgatgctgtcatagtaataccagtgtgcaggtcccaatggctggtattaatgtgacagtctcggggacgcgcaattgggtggcctcgatgctgtcatagtaataccagtgtgcaggtcccaatggctggtattaatgtgacagtctcggggacgcgggcgcgcccgtggcctcgatgctgtcatagtaataccagtgtgcaggtcccaatggctggtattaatgtgacagtctcggggacgcgggcctggacgccggcatccgggctcaggacccccctcgagctcgctgatcagcctcgactgtgccttctagttgccagccatctgttgtttgcccctcccccgtgccttccttgaccctggaaggtgccactcccactgtcctttcctaataaaatgaggaaattgcatcgcattgtctgagtaggtgtcattctattctggggggtggggtggggcaggacagcaagggggaggattgggaagacaatagcaggcatgctggggatgcggtgggctctatggaagcttgaattcagctgacgtgcctcggaccgctaggaacccctagtgatggagttggccactccctctctgcgcgctcgctcgctcactgaggccgggcgaccaaaggtcgcccgacgcccgggctttgcccgggcggcctcagtgagcgagcgagcgcgcagctgcctgcagg

SEQ ID NO: 252 - DNA, 3342 bp, synthetic construct
  misc_feature 1..3342: note = Description of Artificial Sequence: Syntheticpolynucleotide
  source 1..3342: mol_type = other DNA
cctgcaggcagctgcgcgctcgctcgctcactgaggccgcccgggcgtcgggcgacctttggtcgcccggcctcagtgagcgagcgagcgcgcagagagggagtggccaactccatcactaggggttcctgcggccgcacgcgtgacattgattattgactagttattaatagtaatcaattacggggtcattagttcatagcccatatatggagttccgcgttacataacttacggtaaatggcccgcctggctgaccgcccaacgacccccgcccattgacgtcaataatgacgtatgttcccatagtaacgccaatagggactttccattgacgtcaatgggtggactatttacggtaaactgcccacttggcagtacatcaagtgtatcatatgccaagtacgccccctattgacgtcaatgacggtaaatggcccgcctggcattatgcccagtacatgaccttatgggactttcctacttggcagtacatctacgtattagtcatcgctattaccatgggtcgaggtgagccccacgttctgcttcactctccccatctcccccccctccccacccccaattttgtatttatttattttttaattattttgtgcagcgatgggggcggggggggggggggcgcgcgccaggcggggcggggcggggcgaggggcggggcggggcgaggcggagaggtgcggcggcagccaatcagagcggcgcgctccgaaagtttccttttatggcgaggcggcggcggcggcggccctataaaaagcgaagcgcgcggcgggcgggagtcgctgcgttgccttcgccccgtgccccgctccgcgccgcctcgcgccgcccgccccggctctgactgaccgcgttactcccacaggtgagcgggcgggacggcccttctcctccgggctgtaattagcgcttggtttaatgacggctcgtttcttttctgtggctgcgtgaaagccttaaagggctccgggagggccctttgtgcgggggggagcggctcggggggtgcgtgcgtgtgtgtgtgcgtggggagcgccgcgtgcggcccgcgctgcccggcggctgtgagcgctgcgggcgcggcgcggggctttgtgcgctccgcgtgtgcgcgaggggagcgcggccgggggcggtgccccgcggtgcgggggggctgcgaggggaacaaaggctgcgtgcggggtgtgtgcgtgggggggtgagcagggggtgtgggcgcggcggtcgggctgtaacccccccctgcacccccctccccgagttgctgagcacggcccggcttcgggtgcggggctccgtgcggggcgtggcgcggggctcgccgtgccgggcggggggtggcggcaggtgggggtgccgggcggggcggggccgcctcgggccggggagggctcgggggaggggcgcggcggcccccggagcgccggcggagcaggaggaccaaggccctggcgaaggccgtggcctcgttgagtcttagagaggcccggtgtgcaggtcccaatggccgggtcttactgagattccacggggacgcgggatccggtggcctcgttgagtcttagagaggcccggtgtgcaggtcccaatggccgggtcttactgagattccacggggacgcgggtacccgtggcctcgttgagtcttagagaggcccggtgtgcaggtcccaatggccgggtcttactgagattccacggggacgcgggcctggacgccggcatccgggctcaggacccccctctctagagcctctgctaaccatgttcatgccttcttctttttcctacagctcctgggcaacgtgctggttattgtgaccggtcgctagccaccatggtgagcaagggcgaggagctgttcaccggggtggtgcccatcctggtcgagctggacggcgacgtaaacggccacaagttcagcgtgtccggcgagggcgagggcgatgccacctacggcaagctgaccctgaagttcatctgcaccaccggcaagctgcccgtgccctggcccaccctcgtgaccaccctgacctacggcgtgcagtgcttcagccgctaccccgaccacatgaagcagcacgacttcttcaagtccgccatgcccgaaggctacgtccaggagcgcaccatcttcttcaaggacgacggcaactacaagacccgcgccgaggtgaagttcgagggcgacaccctggtgaaccgcatcgagctgaagggcatcgacttcaaggaggacggcaacatcctggggcacaagctggagtacaactacaacagccacaacgtctatatcatggccgacaagcagaagaacggcatcaaggtgaacttcaagatccgccacaacatcgaggacggcagcgtgcagctcgccgaccactaccagcagaacacccccatcggcgacggccccgtgctgctgcccgacaaccactacctgagcacccagtccgccctgagcaaagaccccaacgagaagcgcgatcacatggtcctgctggagttcgtgaccgccgccgggatcactctcggcatggacgagctgtacaagtaacctgcaggcgccggcggagcaggaggaccaaggccctggcgaaggccgtggcctcgatgctgtcatagtaataccagtgtgcaggtcccaatggctggtattaatgtgacagtctcggggacgcgcaattgggtggcctcgatgctgtcatagtaataccagtgtgcaggtcccaatggctggtattaatgtgacagtctcggggacgcgggcgcgcccgtggcctcgatgctgtcatagtaataccagtgtgcaggtcccaatggctggtattaatgtgacagtctcggggacgcgggcctggacgccggcatccgggctcaggacccccctcgagctcgctgatcagcctcgactgtgccttctagttgccagccatctgttgtttgcccctcccccgtgccttccttgaccctggaaggtgccactcccactgtcctttcctaataaaatgaggaaattgcatcgcattgtctgagtaggtgtcattctattctggggggtggggtggggcaggacagcaagggggaggattgggaagacaatagcaggcatgctggggatgcggtgggctctatggaagcttgaattcagctgacgtgcctcggaccgctaggaacccctagtgatggagttggccactccctctctgcgcgctcgctcgctcactgaggccgggcgaccaaaggtcgcccgacgcccgggctttgcccgggcggcctcagtgagcgagcgagcgcgcagctgcctgcagg

SEQ ID NO: 253 - DNA, 4529 bp, synthetic construct
  misc_feature 1..4529: note = Description of Artificial Sequence: Syntheticpolynucleotide
  source 1..4529: mol_type = other DNA
ctgcgcgctcgctcgctcactgaggccgcccgggcgtcgggcgacctttggtcgcccggcctcagtgagcgagcgagcgcgcagagagggagtggccaactccatcactaggggttcctgcggccgcacgcgtgacattgattattgactagttattaatagtaatcaattacggggtcattagttcatagcccatatatggagttccgcgttacataacttacggtaaatggcccgcctggctgaccgcccaacgacccccgcccattgacgtcaataatgacgtatgttcccatagtaacgccaatagggactttccattgacgtcaatgggtggactatttacggtaaactgcccacttggcagtacatcaagtgtatcatatgccaagtacgccccctattgacgtcaatgacggtaaatggcccgcctggcattatgcccagtacatgaccttatgggactttcctacttggcagtacatctacgtattagtcatcgctattaccatgggtcgaggtgagccccacgttctgcttcactctccccatctcccccccctccccacccccaattttgtatttatttattttttaattattttgtgcagcgatgggggcggggggggggggggcgcgcgccaggcggggcggggcggggcgaggggcggggcggggcgaggcggagaggtgcggcggcagccaatcagagcggcgcgctccgaaagtttccttttatggcgaggcggcggcggcggcggccctataaaaagcgaagcgcgcggcgggcgggagtcgctgcgttgccttcgccccgtgccccgctccgcgccgcctcgcgccgcccgccccggctctgactgaccgcgttactcccacaggtgagcgggcgggacggcccttctcctccgggctgtaattagcgcttggtttaatgacggctcgtttcttttctgtggctgcgtgaaagccttaaagggctccgggagggccctttgtgcgggggggagcggctcggggggtgcgtgcgtgtgtgtgtgcgtggggagcgccgcgtgcggcccgcgctgcccggcggctgtgagcgctgcgggcgcggcgcggggctttgtgcgctccgcgtgtgcgcgaggggagcgcggccgggggcggtgccccgcggtgcgggggggctgcgaggggaacaaaggctgcgtgcggggtgtgtgcgtgggggggtgagcagggggtgtgggcgcggcggtcgggctgtaacccccccctgcacccccctccccgagttgctgagcacggcccggcttcgggtgcggggctccgtgcggggcgtggcgcggggctcgccgtgccgggcggggggtggcggcaggtgggggtgccgggcggggcggggccgcctcgggccggggagggctcgggggaggggcgcggcggcccccggagcgccggcggagcaggaggaccaaggccctggcgaaggccgtggcctcgttgagtcttagagaggcccggtgtgcaggtcccaatggccgggtcttactgagattccacggggacgcgggcctggacgccggcatccgggctcaggacccccctctctagagcctctgctaaccatgttcatgccttcttctttttcctacagctcctgggcaacgtgctggttattgtgaccggtcgctagccaccatggctgaagcccctcctagaaggcttggactgggacctcctcctggggatgctcctagagctgaactggtggctctgacagccgtgcagtctgaacaaggcgaagctggtggcggcggatctccacgtagacttggactgctgggaagccctcttcctcctggtgctccacttcctggacctggcagtggatctggatctgcctgtggccagagaagctctgccgctcacaagagataccggcggctgcagaactgggtgtacaacgtgctggaaagacccagaggctgggccttcgtgtaccacgtgttcatctttctgctggtgttcagctgcctggtgctgtccgtgctgagcaccatccaagaacatcaagagctggctaacgagtgcctgttaatactggagtttgtgatgattgtggtgttcggcctcgagtacatcgtccgcgtttggagcgccggctgctgctgcagatatagaggttggcaaggcagattccgcttcgccagaaagcccttctgcgtgatcgacttcatcgtgttcgtggccagcgtggccgtgattgctgctggcacacagggcaacatcttcgccacaagcgccctgcggagcatgcggtttctgcagatcctgagaatggtccgaatggacagaagaggcggcacctggaagctgctgggctctgtggtgtacgcccacagcaaagagctgatcaccgcctggtacatcggatttctggtgctgatcttcgcctccttcctggtgtacctggccgagaaggacgccaacagcgactttagcagctacgccgactctctttggtggggcaccatcacactgaccaccatcggctacggcgacaagacccctcacacatggctgggaagagtgctggccgctggatttgctctgctgggcatcagctttttcgccctgcctgccggaatcctcggatctggctttgccctgaaggtgcaagagcagcatagacaaaagcattttgaaaagagaagaatgcctgccgccaacctgattcaggccgcttggagactgtacagcaccgacatgagcagagcctacctgaccgccacgtggtattattacgattcgatcctgcctagcttccgcgaactggccctgctgtttgagcatgtgcagagagccagaaacggcggcctcagacctctggaagttcggagagcacctgtgcctgatggcgccccttctagatatcctccagtggccacctgtcacagacccggcagcacatctttttgccctggcgagtctagccggatgggcatcaaggacagaatcagaatgggcagcagccagcggagaacaggcccttctaaacagcatctggcccctccaaccatgcctacaagccctagctctgagcaagtgggcgaagccacctctcctaccaaggtgcagaagtcctggtccttcaacgaccggaccagatttagagccagcctccggctgaagcccagaacctctgccgaggatgccccttctgaagaggtggccgaagagaagtcctaccagtgcgagctgaccgtggacgacatcatgccagccgtgaaaaccgtgataaggtctatacgcatcctgaagttcctggtggccaagcggaagttcaaagagacactgcggccctacgacgtgaaggacgtgatcgagcagtattctgccggccacctggacatgctgggcagaatcaagagcctgcagaccagagtggaccagatcgttggaagaggcccaggcgacagaaaggccagagagaagggcgataagggcccatctgatgccgaggttgtcgacgagatatcaatgatgggcagagtcgtgaaagtcgaaaaacaggtgcagagcatcgagcacaagctggacctgctgctgggattctacagccggtgtctgagaagcggcacatctgcatctctgggcgctgtgcaggtcccactgttcgatcctgatattacgagcgattatcacagccccgtggaccacgaggacatctccgtttctgctcagaccctgagcatcagcagatccgtgtccaccaacatggactaacctgcaggcgccggcggagcaggaggaccaaggccctggcgaaggccgtggcctcgatgctgtcatagtaataccagtgtgcaggtcccaatggctggtattaatgtgacagtctcggggacgcgcaattgggtggcctcgatgctgtcatagtaataccagtgtgcaggtcccaatggctggtattaatgtgacagtctcggggacgcgggcgcgcccgtggcctcgatgctgtcatagtaataccagtgtgcaggtcccaatggctggtattaatgtgacagtctcggggacgcgggcctggacgccggcatccgggctcaggacccccctcgagctcgctgatcagcctcgactgtgccttctagttgccagccatctgttgtttgcccctcccccgtgccttccttgaccctggaaggtgccactcccactgtcctttcctaataaaatgaggaaattgcatcgcattgtctgagtaggtgtcattctattctggggggtggggtggggcaggacagcaagggggaggattgggaagacaatagcaggcatgctggggatgcggtgggctctatggaagcttgaattcagctgacgtgcctcggaccgctaggaacccctagtgatggagttggccactccctctctgcgcgctcgctcgctcactgaggccgggcgaccaaaggtcgcccgacgcccgggctttgcccgggcggcctcagtgagcgagcgagcgcgcagctgcctgcagg

SEQ ID NO: 254 - DNA, 4710 bp, synthetic construct
  misc_feature 1..4710: note = Description of Artificial Sequence: Syntheticpolynucleotide
  source 1..4710: mol_type = other DNA
cctgcaggcagctgcgcgctcgctcgctcactgaggccgcccgggcgtcgggcgacctttggtcgcccggcctcagtgagcgagcgagcgcgcagagagggagtggccaactccatcactaggggttcctgcggccgcacgcgtgacattgattattgactagttattaatagtaatcaattacggggtcattagttcatagcccatatatggagttccgcgttacataacttacggtaaatggcccgcctggctgaccgcccaacgacccccgcccattgacgtcaataatgacgtatgttcccatagtaacgccaatagggactttccattgacgtcaatgggtggactatttacggtaaactgcccacttggcagtacatcaagtgtatcatatgccaagtacgccccctattgacgtcaatgacggtaaatggcccgcctggcattatgcccagtacatgaccttatgggactttcctacttggcagtacatctacgtattagtcatcgctattaccatgggtcgaggtgagccccacgttctgcttcactctccccatctcccccccctccccacccccaattttgtatttatttattttttaattattttgtgcagcgatgggggcggggggggggggggcgcgcgccaggcggggcggggcggggcgaggggcggggcggggcgaggcggagaggtgcggcggcagccaatcagagcggcgcgctccgaaagtttccttttatggcgaggcggcggcggcggcggccctataaaaagcgaagcgcgcggcgggcgggagtcgctgcgttgccttcgccccgtgccccgctccgcgccgcctcgcgccgcccgccccggctctgactgaccgcgttactcccacaggtgagcgggcgggacggcccttctcctccgggctgtaattagcgcttggtttaatgacggctcgtttcttttctgtggctgcgtgaaagccttaaagggctccgggagggccctttgtgcgggggggagcggctcggggggtgcgtgcgtgtgtgtgtgcgtggggagcgccgcgtgcggcccgcgctgcccggcggctgtgagcgctgcgggcgcggcgcggggctttgtgcgctccgcgtgtgcgcgaggggagcgcggccgggggcggtgccccgcggtgcgggggggctgcgaggggaacaaaggctgcgtgcggggtgtgtgcgtgggggggtgagcagggggtgtgggcgcggcggtcgggctgtaacccccccctgcacccccctccccgagttgctgagcacggcccggcttcgggtgcggggctccgtgcggggcgtggcgcggggctcgccgtgccgggcggggggtggcggcaggtgggggtgccgggcggggcggggccgcctcgggccggggagggctcgggggaggggcgcggcggcccccggagcgccggcggagcaggaggaccaaggccctggcgaaggccgtggcctcgttgagtcttagagaggcccggtgtgcaggtcccaatggccgggtcttactgagattccacggggacgcgggatccggtggcctcgttgagtcttagagaggcccggtgtgcaggtcccaatggccgggtcttactgagattccacggggacgcgggtacccgtggcctcgttgagtcttagagaggcccggtgtgcaggtcccaatggccgggtcttactgagattccacggggacgcgggcctggacgccggcatccgggctcaggacccccctctctagagcctctgctaaccatgttcatgccttcttctttttcctacagctcctgggcaacgtgctggttattgtgaccggtcgctagccaccatggctgaagcccctcctagaaggcttggactgggacctcctcctggggatgctcctagagctgaactggtggctctgacagccgtgcagtctgaacaaggcgaagctggtggcggcggatctccacgtagacttggactgctgggaagccctcttcctcctggtgctccacttcctggacctggcagtggatctggatctgcctgtggccagagaagctctgccgctcacaagagataccggcggctgcagaactgggtgtacaacgtgctggaaagacccagaggctgggccttcgtgtaccacgtgttcatctttctgctggtgttcagctgcctggtgctgtccgtgctgagcaccatccaagaacatcaagagctggctaacgagtgcctgttaatactggagtttgtgatgattgtggtgttcggcctcgagtacatcgtccgcgtttggagcgccggctgctgctgcagatatagaggttggcaaggcagattccgcttcgccagaaagcccttctgcgtgatcgacttcatcgtgttcgtggccagcgtggccgtgattgctgctggcacacagggcaacatcttcgccacaagcgccctgcggagcatgcggtttctgcagatcctgagaatggtccgaatggacagaagaggcggcacctggaagctgctgggctctgtggtgtacgcccacagcaaagagctgatcaccgcctggtacatcggatttctggtgctgatcttcgcctccttcctggtgtacctggccgagaaggacgccaacagcgactttagcagctacgccgactctctttggtggggcaccatcacactgaccaccatcggctacggcgacaagacccctcacacatggctgggaagagtgctggccgctggatttgctctgctgggcatcagctttttcgccctgcctgccggaatcctcggatctggctttgccctgaaggtgcaagagcagcatagacaaaagcattttgaaaagagaagaatgcctgccgccaacctgattcaggccgcttggagactgtacagcaccgacatgagcagagcctacctgaccgccacgtggtattattacgattcgatcctgcctagcttccgcgaactggccctgctgtttgagcatgtgcagagagccagaaacggcggcctcagacctctggaagttcggagagcacctgtgcctgatggcgccccttctagatatcctccagtggccacctgtcacagacccggcagcacatctttttgccctggcgagtctagccggatgggcatcaaggacagaatcagaatgggcagcagccagcggagaacaggcccttctaaacagcatctggcccctccaaccatgcctacaagccctagctctgagcaagtgggcgaagccacctctcctaccaaggtgcagaagtcctggtccttcaacgaccggaccagatttagagccagcctccggctgaagcccagaacctctgccgaggatgccccttctgaagaggtggccgaagagaagtcctaccagtgcgagctgaccgtggacgacatcatgccagccgtgaaaaccgtgataaggtctatacgcatcctgaagttcctggtggccaagcggaagttcaaagagacactgcggccctacgacgtgaaggacgtgatcgagcagtattctgccggccacctggacatgctgggcagaatcaagagcctgcagaccagagtggaccagatcgttggaagaggcccaggcgacagaaaggccagagagaagggcgataagggcccatctgatgccgaggttgtcgacgagatatcaatgatgggcagagtcgtgaaagtcgaaaaacaggtgcagagcatcgagcacaagctggacctgctgctgggattctacagccggtgtctgagaagcggcacatctgcatctctgggcgctgtgcaggtcccactgttcgatcctgatattacgagcgattatcacagccccgtggaccacgaggacatctccgtttctgctcagaccctgagcatcagcagatccgtgtccaccaacatggactaacctgcaggcgccggcggagcaggaggaccaaggccctggcgaaggccgtggcctcgatgctgtcatagtaataccagtgtgcaggtcccaatggctggtattaatgtgacagtctcggggacgcgcaattgggtggcctcgatgctgtcatagtaataccagtgtgcaggtcccaatggctggtattaatgtgacagtctcggggacgcgggcgcgcccgtggcctcgatgctgtcatagtaataccagtgtgcaggtcccaatggctggtattaatgtgacagtctcggggacgcgggcctggacgccggcatccgggctcaggacccccctcgagctcgctgatcagcctcgactgtgccttctagttgccagccatctgttgtttgcccctcccccgtgccttccttgaccctggaaggtgccactcccactgtcctttcctaataaaatgaggaaattgcatcgcattgtctgagtaggtgtcattctattctggggggtggggtggggcaggacagcaagggggaggattgggaagacaatagcaggcatgctggggatgcggtgggctctatggaagcttgaattcagctgacgtgcctcggaccgctaggaacccctagtgatggagttggccactccctctctgcgcgctcgctcgctcactgaggccgggcgaccaaaggtcgcccgacgcccgggctttgcccgggcggcctcagtgagcgagcgagcgcgcagctgcctgcagg

SEQ ID NO: 255 - DNA, 6417 bp, synthetic construct
  misc_feature 1..6417: note = Description of Artificial Sequence: Syntheticpolynucleotide
  source 1..6417: mol_type = other DNA
cctgcaggcagctgcgcgctcgctcgctcactgaggccgcccgggcgtcgggcgacctttggtcgcccggcctcagtgagcgagcgagcgcgcagagagggagtggccaactccatcactaggggttcctgcggccgcacgcgtctagatcccatatatggagttccgcgttacataacttacggtaaatggcccgcctggctgaccgcccaacgacccccgcccattgacgtcaataatgacgtatgttcccatagtaacgccaatagggactttccattgacgtcaatgggtggagtatttacggtaaactgcccacttggcagtacatcaagtgtatcatatgccaagtacgccccctattgacgtcaatgacggtaaatggcccgcctggcattatgcccagtacatgaccttatgggactttcctacttggcagtacatctacgtattagtcatcgctattaccatggtgatgcggttttggcagtacatcaatgggcgtggatagcggtttgactcacggggatttccaagtctccaccccattgacgtcaatgggagtttgttttggcaccaaaatcaacgggactttccaaaatgtcgtaacaactccgccccattgacgcaaatgggcggtaggcgtgtacggtgggaggtctatataagcagagctcgtttagtgaaccgtcagatcgcctggagacgcaccggtgccaccatggctgaagcccctcctagaaggcttggactgggacctcctcctggggatgctcctagagctgaactggtggctctgacagccgtgcagtctgaacaaggcgaagctggtggcggcggatctccacgtagacttggactgctgggaagccctcttcctcctggtgctccacttcctggacctggcagtggatctggatctgcctgtggccagagaagctctgccgctcacaagagataccggcggctgcagaactgggtgtacaacgtgctggaaagacccagaggctgggccttcgtgtaccacgtgttcatctttctgctggtgttcagctgcctggtgctgtccgtgctgagcaccatccaagaacatcaagagctggctaacgagtgcctgttaatactggagtttgtgatgattgtggtgttcggcctcgagtacatcgtccgcgtttggagcgccggctgctgctgcagatatagaggttggcaaggcagattccgcttcgccagaaagcccttctgcgtgatcgacttcatcgtgttcgtggccagcgtggccgtgattgctgctggcacacagggcaacatcttcgccacaagcgccctgcggagcatgcggtttctgcagatcctgagaatggtccgaatggacagaagaggcggcacctggaagctgctgggctctgtggtgtacgcccacagcaaagagctgatcaccgcctggtacatcggatttctggtgctgatcttcgcctccttcctggtgtacctggccgagaaggacgccaacagcgactttagcagctacgccgactctctttggtggggcaccatcacactgaccaccatcggctacggcgacaagacccctcacacatggctgggaagagtgctggccgctggatttgctctgctgggcatcagctttttcgccctgcctgccggaatcctcggatctggctttgccctgaaggtgcaagagcagcatagacaaaagcattttgaaaagagaagaatgcctgccgccaacctgattcaggccgcttggagactgtacagcaccgacatgagcagagcctacctgaccgccacgtggtattattacgattcgatcctgcctagcttccgcgaactggccctgctgtttgagcatgtgcagagagccagaaacggcggcctcagacctctggaagttcggagagcacctgtgcctgatggcgccccttctagatatcctccagtggccacctgtcacagacccggcagcacatctttttgccctggcgagtctagccggatgggcatcaaggacagaatcagaatgggcagcagccagcggagaacaggcccttctaaacagcatctggcccctccaaccatgcctacaagccctagctctgagcaagtgggcgaagccacctctcctaccaaggtgcagaagtcctggtccttcaacgaccggaccagatttagagccagcctccggctgaagcccagaacctctgccgaggatgccccttctgaagaggtggccgaagagaagtcctaccagtgcgagctgaccgtggacgacatcatgccagccgtgaaaaccgtgataaggtctatacgcatcctgaagttcctggtggccaagcggaagttcaaagagacactgcggccctacgacgtgaaggacgtgatcgagcagtattctgccggccacctggacatgctgggcagaatcaagagcctgcagaccagagtggaccagatcgttggaagaggcccaggcgacagaaaggccagagagaagggcgataagggcccatctgatgccgaggttgtcgacgagatatcaatgatgggcagagtcgtgaaagtcgaaaaacaggtgcagagcatcgagcacaagctggacctgctgctgggattctacagccggtgtctgagaagcggcacatctgcatctctgggcgctgtgcaggtcccactgttcgatcctgatattacgagcgattatcacagccccgtggaccacgaggacatctccgtttctgctcagaccctgagcatcagcagatccgtgtccaccaacatggacggatcccgggctgactacaaagaccatgacggtgattataaagatcatgacatcgactacaaggatgacgatgacaagggctccggagagggcagaggaagtctgctaacatgcggtgacgtcgaggagaatcctggcccaatggtgagcaagggcgaggcagtgatcaaggagttcatgcggttcaaggtgcacatggagggctccatgaacggccacgagttcgagatcgagggcgagggcgagggccgcccctacgagggcacccagaccgccaagctgaaggtgaccaagggtggccccctgcccttctcctgggacatcctgtcccctcagttcatgtacggctccagggccttcatcaagcaccccgccgacatccccgactactataagcagtccttccccgagggcttcaagtgggagcgcgtgatgaacttcgaggacggcggcgccgtgaccgtgacccaggacacctccctggaggacggcaccctgatctacaaggtgaagctccgcggcaccaacttccctcctgacggccccgtaatgcagaagaagacaatgggctgggaagcgtccaccgagcggttgtaccccgaggacggcgtgctgaagggcgacattaagatggccctgcgcctgaaggacggcggccgctacctggcggacttcaagaccacctacaaggccaagaagcccgtgcagatgcccggcgcctacaacgtcgaccgcaagttggacatcacctcccacaacgaggactacaccgtggtggaacagtacgaacgctccgagggccgccactccaccggcggcatggacgagctgtacaagtaataagagctcgctgatcagcctcgactgtgccttctagttgccagccatctgttgtttgcccctcccccgtgccttccttgaccctggaaggtgccactcccactgtcctttcctaataaaatgaggaaattgcatcgcattgtctgagtaggtgtcattctattctggggggtggggtggggcaggacagcaagggggaggattgggaagacaatagcaggcatgctggggatgcggtgggctctatggaagcttgaattcagctgacgtgcctcggaccgctaggaacccctagtgatggagttggccactccctctctgcgcgctcgctcgctcactgaggccgggcgaccaaaggtcgcccgacgcccgggctttgcccgggcggcctcagtgagcgagcgagcgcgcagctgcctgcaggggcgcctgatgcggtattttctccttacgcatctgtgcggtatttcacaccgcatacgtcaaagcaaccatagtacgcgccctgtagcggcgcattaagcgcggcgggtgtggtggttacgcgcagcgtgaccgctacacttgccagcgccctagcgcccgctcctttcgctttcttcccttcctttctcgccacgttcgccggctttccccgtcaagctctaaatcgggggctccctttagggttccgatttagtgctttacggcacctcgaccccaaaaaacttgatttgggtgatggttcacgtagtgggccatcgccctgatagacggtttttcgccctttgacgttggagtccacgttctttaatagtggactcttgttccaaactggaacaacactcaaccctatctcgggctattcttttgatttataagggattttgccgatttcggcctattggttaaaaaatgagctgatttaacaaaaatttaacgcgaattttaacaaaatattaacgtttacaattttatggtgcactctcagtacaatctgctctgatgccgcatagttaagccagccccgacacccgccaacacccgctgacgcgccctgacgggcttgtctgctcccggcatccgcttacagacaagctgtgaccgtctccgggagctgcatgtgtcagaggttttcaccgtcatcaccgaaacgcgcgagacgaaagggcctcgtgatacgcctatttttataggttaatgtcatgaacaataaaactgtctgcttacataaacagtaatacaaggggtgttatgagccatattcaacgggaaacgtcgaggccgcgattaaattccaacatggatgctgatttatatgggtataaatgggctcgcgataatgtcgggcaatcaggtgcgacaatctatcgcttgtatgggaagcccgatgcgccagagttgtttctgaaacatggcaaaggtagcgttgccaatgatgttacagatgagatggtcagactaaactggctgacggaatttatgcctcttccgaccatcaagcattttatccgtactcctgatgatgcatggttactcaccactgcgatccccggaaaaacagcattccaggtattagaagaatatcctgattcaggtgaaaatattgttgatgcgctggcagtgttcctgcgccggttgcattcgattcctgtttgtaattgtccttttaacagcgatcgcgtatttcgtctcgctcaggcgcaatcacgaatgaataacggtttggttgatgcgagtgattttgatgacgagcgtaatggctggcctgttgaacaagtctggaaagaaatgcataaacttttgccattctcaccggattcagtcgtcactcatggtgatttctcacttgataaccttatttttgacgaggggaaattaataggttgtattgatgttggacgagtcggaatcgcagaccgataccaggatcttgccatcctatggaactgcctcggtgagttttctccttcattacagaaacggctttttcaaaaatatggtattgataatcctgatatgaataaattgcagtttcatttgatgctcgatgagtttttctaatctcatgaccaaaatcccttaacgtgagttttcgttccactgagcgtcagaccccgtagaaaagatcaaaggatcttcttgagatcctttttttctgcgcgtaatctgctgcttgcaaacaaaaaaaccaccgctaccagcggtggtttgtttgccggatcaagagctaccaactctttttccgaaggtaactggcttcagcagagcgcagataccaaatactgtccttctagtgtagccgtagttaggccaccacttcaagaactctgtagcaccgcctacatacctcgctctgctaatcctgttaccagtggctgctgccagtggcgataagtcgtgtcttaccgggttggactcaagacgatagttaccggataaggcgcagcggtcgggctgaacggggggttcgtgcacacagcccagcttggagcgaacgacctacaccgaactgagatacctacagcgtgagctatgagaaagcgccacgcttcccgaagggagaaaggcggacaggtatccggtaagcggcagggtcggaacaggagagcgcacgagggagcttccagggggaaacgcctggtatctttatagtcctgtcgggtttcgccacctctgacttgagcgtcgatttttgtgatgctcgtcaggggggcggagcctatggaaaaacgccagcaacgcggcctttttacggttcctggccttttgctggccttttgctcacatgt

SEQ ID NO: 256 - DNA, 4070 bp, synthetic construct
  misc_feature 1..4070: note = Description of Artificial Sequence: Syntheticpolynucleotide
  source 1..4070: mol_type = other DNA
cctgcaggcagctgcgcgctcgctcgctcactgaggccgcccgggcgtcgggcgacctttggtcgcccggcctcagtgagcgagcgagcgcgcagagagggagtggccaactccatcactaggggttcctgcggccgcacgcgtctagatcccatatatggagttccgcgttacataacttacggtaaatggcccgcctggctgaccgcccaacgacccccgcccattgacgtcaataatgacgtatgttcccatagtaacgccaatagggactttccattgacgtcaatgggtggagtatttacggtaaactgcccacttggcagtacatcaagtgtatcatatgccaagtacgccccctattgacgtcaatgacggtaaatggcccgcctggcattatgcccagtacatgaccttatgggactttcctacttggcagtacatctacgtattagtcatcgctattaccatggtgatgcggttttggcagtacatcaatgggcgtggatagcggtttgactcacggggatttccaagtctccaccccattgacgtcaatgggagtttgttttggcaccaaaatcaacgggactttccaaaatgtcgtaacaactccgccccattgacgcaaatgggcggtaggcgtgtacggtgggaggtctatataagcagagctcgtttagtgaaccgtcagatcgcctggagacgcaccggtgccaccatggccgaggcccccccgcgccgcctcggcctgggtcccccgcccggggacgccccccgcgcggagctagtggcgctcacggccgtgcagagcgaacagggcgaggcgggcgggggcggctccccgcgccgcctcggcctcctgggcagccccctgccgccgggcgcgcccctccctgggccgggctccggctcgggctccgcctgcggccagcgctcctcggccgcgcacaagcgctaccgccgcctgcagaactgggtctacaacgtgctggagcggccccgcggctgggccttcgtctaccacgtcttcatatttttgctggtcttcagctgcctggtgctgtctgtgctgtccactatccaggagcaccaggaacttgccaacgagtgtctcctcatcttggaattcgtgatgatcgtggttttcggcttggagtacatcgtccgggtctggtccgccggatgctgctgccgctaccgaggatggcagggtcgcttccgctttgccagaaagcccttctgtgtcatcgacttcatcgtgttcgtggcctcggtggccgtcatcgccgcgggtacccagggcaacatcttcgccacgtccgcgctgcgcagcatgcgcttcctgcagatcctgcgcatggtgcgcatggaccgccgcggcggcacctggaagctgctgggctcagtggtctacgcgcatagcaaggagctgatcaccgcctggtacatcgggttcctggtgctcatcttcgcctccttcctggtctacctggctgagaaggacgccaactccgacttctcctcctacgccgactcgctctggtgggggacgattacattgacaaccatcggctatggtgacaagacaccgcacacatggctgggcagggtcctggctgctggcttcgccttactgggcatctctttctttgccctgcctgccggcatcctaggctccggctttgccctgaaggtccaggagcagcaccggcagaagcacttcgagaagcggaggatgccggcagccaacctcatccaggctgcctggcgcctgtactccaccgatatgagccgggcctacctgacagccacctggtactactatgacagtatcctcccatccttcagagagctggccctcttgtttgagcacgtgcaacgggcccgcaatgggggcctacggcccctggaggtgcggcgggcgccggtacccgacggagcaccctcccgttacccgcccgttgccacctgccaccggccgggcagcacctccttctgccctggggaaagcagccggatgggcatcaaagaccgcatccgcatgggcagctcccagcggcggacgggtccttccaagcagcatctggcacctccaacaatgcccacctccccaagcagcgagcaggtgggtgaggccaccagccccaccaaggtgcaaaagagctggagcttcaatgaccgcacccgcttccgggcatctctgagactcaaaccccgcacctctgctgaggatgccccctcagaggaagtagcagaggagaagagctaccagtgtgagctcacggtggacgacatcatgcctgctgtgaagacagtcatccgctccatcaggattctcaagttcctggtggccaaaaggaaattcaaggagacactgcgaccgtacgacgtgaaggacgtcattgagcagtactcagcaggccacctggacatgctgggccggatcaagagcctgcaaactcgggtggaccaaattgtgggtcgggggcccggggacaggaaggcccgggagaagggcgacaaggggccctccgacgcggaggtggtggatgaaatcagcatgatgggacgcgtggtcaaggtggagaagcaggtgcagtccatcgagcacaagctggacctgctgttgggcttctattcgcgctgcctgcgctctggcacctcggccagcctgggcgccgtgcaagtgccgctgttcgaccccgacatcacctccgactaccacagccctgtggaccacgaggacatctccgtctccgcacagacgctcagcatctcccgctcggtcagcaccaacatggacggatcccgggctgactacaaagaccatgacggtgattataaagatcatgacatcgactacaaggatgacgatgacaagggctccggagagggcagaggaagtctgctaacatgcggtgacgtcgaggagaatcctggcccaatggtgagcaagggcgaggcagtgatcaaggagttcatgcggttcaaggtgcacatggagggctccatgaacggccacgagttcgagatcgagggcgagggcgagggccgcccctacgagggcacccagaccgccaagctgaaggtgaccaagggtggccccctgcccttctcctgggacatcctgtcccctcagttcatgtacggctccagggccttcatcaagcaccccgccgacatccccgactactataagcagtccttccccgagggcttcaagtgggagcgcgtgatgaacttcgaggacggcggcgccgtgaccgtgacccaggacacctccctggaggacggcaccctgatctacaaggtgaagctccgcggcaccaacttccctcctgacggccccgtaatgcagaagaagacaatgggctgggaagcgtccaccgagcggttgtaccccgaggacggcgtgctgaagggcgacattaagatggccctgcgcctgaaggacggcggccgctacctggcggacttcaagaccacctacaaggccaagaagcccgtgcagatgcccggcgcctacaacgtcgaccgcaagttggacatcacctcccacaacgaggactacaccgtggtggaacagtacgaacgctccgagggccgccactccaccggcggcatggacgagctgtacaagtaataagagctcgctgatcagcctcgactgtgccttctagttgccagccatctgttgtttgcccctcccccgtgccttccttgaccctggaaggtgccactcccactgtcctttcctaataaaatgaggaaattgcatcgcattgtctgagtaggtgtcattctattctggggggtggggtggggcaggacagcaagggggaggattgggaagacaatagcaggcatgctggggatgcggtgggctctatggaagcttgaattcagctgacgtgcctcggaccgctaggaacccctagtgatggagttggccactccctctctgcgcgctcgctcgctcactgaggccgggcgaccaaaggtcgcccgacgcccgggctttgcccgggcggcctcagtgagcgagcgagcgcgcagctgcctgcagg

SEQ ID NO: 257 - DNA, 4073 bp, synthetic construct
  misc_feature 1..4073: note = Description of Artificial Sequence: Syntheticpolynucleotide
  source 1..4073: mol_type = other DNA
cctgcaggcagctgcgcgctcgctcgctcactgaggccgcccgggcgtcgggcgacctttggtcgcccggcctcagtgagcgagcgagcgcgcagagagggagtggccaactccatcactaggggttcctgcggccgcacgcgtctagatcccatatatggagttccgcgttacataacttacggtaaatggcccgcctggctgaccgcccaacgacccccgcccattgacgtcaataatgacgtatgttcccatagtaacgccaatagggactttccattgacgtcaatgggtggagtatttacggtaaactgcccacttggcagtacatcaagtgtatcatatgccaagtacgccccctattgacgtcaatgacggtaaatggcccgcctggcattatgcccagtacatgaccttatgggactttcctacttggcagtacatctacgtattagtcatcgctattaccatggtgatgcggttttggcagtacatcaatgggcgtggatagcggtttgactcacggggatttccaagtctccaccccattgacgtcaatgggagtttgttttggcaccaaaatcaacgggactttccaaaatgtcgtaacaactccgccccattgacgcaaatgggcggtaggcgtgtacggtgggaggtctatataagcagagctcgtttagtgaaccgtcagatcgcctggagacgcaccggtgccaccatggccgaggcccccccgcgccgcctcggcctgggccccccgcccggggacgccccccgcgcggagttggtggcgctcacggccgtgcagagtgaacagggcgaggcgggcgggggcggctctccgcgtcgcctcggccttctgggcagccccctgccgccgggcgcgcccctccctgggccgggctccggctcgggctccgcctgcggcggccagcgctcctccgccgcgcagaagcgctaccgccgcctgcagaactgggtctacaacgtgctggagcggccccgcgggtgggccttcgtctaccacgtcttcatatttttgctagtcttcagctgcctggtgctgtctgtactgtccaccatccaggagcaccaggaacttgccaacgagtgtctccttatcttggaattcgtgatgattgtggtctttggcttggagtatataatccgtgtctggtcggccggatgctgttgtcgctacagaggatggcagggacgctttcgcttcgccaggaaacccttctgtgtcatcgacttcatcgtgttcgtggcctcggtggcagtgatagctgcgggcacacaaggcaacatctttgctacgtccgcgttgcgcagtatgcgcttcctacagatcctgcgcatggtgcgtatggatcgccgcggtggcacctggaagctgttgggatccgtggtctatgcgcacagtaaggagctgatcaccgcctggtacatcgggttcctggtgctcatctttgcctctttcctggtctacctggctgagaaggatgccaactctgacttctcctcctatgccgactcgctctggtgggggacgatcacactgacgaccattggctatggtgacaagacgccacatacatggctgggcagggttctggctgccggcttcgccttactgggcatctccttctttgccctgcctgccggcatcctgggctctggctttgccctgaaggtccaggagcagcacaggcagaagcactttgagaagcgcaggatgccagcagctaatctcatccaggctgcgtggcgcctgtactccacggacacaagccgggcctatttgacagccacctggtattactatgacagcattctcccatctttcagagagctggccctcttgtttgagcacatacaacgggcccgcaatgggggcttacggcccctggaggtgaggcgggcgccagtacctgatggagcgccctctcgctacccgcccgttgccacctgccaccggccaggcagtgcctccttctgccctggggaaagcagccggatgggcatcaaagaccgaatccgcataagcagctcccagaagcggacaggcccctccaagcagcatctggcccctccgccgattcccacctcgccaagcagtgagcaggtgggcgaggcatccagccccagcaaggtgcagaaaagctggagcttcaatgaccgcacccgcttccgggcctctctaagactcaagcctcgctgctctgctgaggagggcccctcagaggaagtggccgaggagaagagctaccagtgtgagcttacggtggatgatgtcatgcctgctgtgaagacggtcatccgttctgtcaggattctgaagttcctggtagccaaaaggaaattcaaggagacgctgcggccatatgatgtgaaggatgtcattgagcagtattcagcaggacacctggacatgctgggacgaatcaagagcctgcaagcccgggtggaccaaattgtgggtcggggccctggggaccgcaagactcgggagaagggcgataagggtccttcagacacggaggcagtggatgaaatcagcatgatggggcgcgtagtcaaggtggaaaagcaggtgcagtccatcgaacataagttggatctgctgctgggcttctactcgcgctgcctccgctctggcacctcggccagcctgggcactgtgcaagtgccgctcttcgaccccgacatcacctcggactaccacagccctgtagaccacgaggacatctctgtctccgcacagacgctcagcatctctcgctcagtcagcaccaacatggacggatcccgggctgactacaaagaccatgacggtgattataaagatcatgacatcgactacaaggatgacgatgacaagggctccggagagggcagaggaagtctgctaacatgcggtgacgtcgaggagaatcctggcccaatggtgagcaagggcgaggcagtgatcaaggagttcatgcggttcaaggtgcacatggagggctccatgaacggccacgagttcgagatcgagggcgagggcgagggccgcccctacgagggcacccagaccgccaagctgaaggtgaccaagggtggccccctgcccttctcctgggacatcctgtcccctcagttcatgtacggctccagggccttcatcaagcaccccgccgacatccccgactactataagcagtccttccccgagggcttcaagtgggagcgcgtgatgaacttcgaggacggcggcgccgtgaccgtgacccaggacacctccctggaggacggcaccctgatctacaaggtgaagctccgcggcaccaacttccctcctgacggccccgtaatgcagaagaagacaatgggctgggaagcgtccaccgagcggttgtaccccgaggacggcgtgctgaagggcgacattaagatggccctgcgcctgaaggacggcggccgctacctggcggacttcaagaccacctacaaggccaagaagcccgtgcagatgcccggcgcctacaacgtcgaccgcaagttggacatcacctcccacaacgaggactacaccgtggtggaacagtacgaacgctccgagggccgccactccaccggcggcatggacgagctgtacaagtaataagagctcgctgatcagcctcgactgtgccttctagttgccagccatctgttgtttgcccctcccccgtgccttccttgaccctggaaggtgccactcccactgtcctttcctaataaaatgaggaaattgcatcgcattgtctgagtaggtgtcattctattctggggggtggggtggggcaggacagcaagggggaggattgggaagacaatagcaggcatgctggggatgcggtgggctctatggaagcttgaattcagctgacgtgcctcggaccgctaggaacccctagtgatggagttggccactccctctctgcgcgctcgctcgctcactgaggccgggcgaccaaaggtcgcccgacgcccgggctttgcccgggcggcctcagtgagcgagcgagcgcgcagctgcctgcagg

SEQ ID NO: 258 - DNA, 3715 bp, synthetic construct
  misc_feature 1..3715: note = Description of Artificial Sequence: Syntheticpolynucleotide
  source 1..3715: mol_type = other DNA
ctgcgcgctcgctcgctcactgaggccgcccgggcgtcgggcgacctttggtcgcccggcctcagtgagcgagcgagcgcgcagagagggagtggccaactccatcactaggggttcctgcggccgcacgcgtctagatcccatatatggagttccgcgttacataacttacggtaaatggcccgcctggctgaccgcccaacgacccccgcccattgacgtcaataatgacgtatgttcccatagtaacgccaatagggactttccattgacgtcaatgggtggagtatttacggtaaactgcccacttggcagtacatcaagtgtatcatatgccaagtacgccccctattgacgtcaatgacggtaaatggcccgcctggcattatgcccagtacatgaccttatgggactttcctacttggcagtacatctacgtattagtcatcgctattaccatggtgatgcggttttggcagtacatcaatgggcgtggatagcggtttgactcacggggatttccaagtctccaccccattgacgtcaatgggagtttgttttggcaccaaaatcaacgggactttccaaaatgtcgtaacaactccgccccattgacgcaaatgggcggtaggcgtgtacggtgggaggtctatataagcagagctcgtttagtgaaccgtcagatcgcctggagacgcaccggtgccaccatggaagatgccaaaaacattaagaagggcccagcgccattctacccactcgaagacgggaccgccggcgagcagctgcacaaagccatgaagcgctacgccctggtgcccggcaccatcgcctttaccgacgcacatatcgaggtggacattacctacgccgagtacttcgagatgagcgttcggctggcagaagctatgaagcgctatgggctgaatacaaaccatcggatcgtggtgtgcagcgagaatagcttgcagttcttcatgcccgtgttgggtgccctgttcatcggtgtggctgtggccccagctaacgacatctacaacgagcgcgagctgctgaacagcatgggcatcagccagcccaccgtcgtattcgtgagcaagaaagggctgcaaaagatcctcaacgtgcaaaagaagctaccgatcatacaaaagatcatcatcatggatagcaagaccgactaccagggcttccaaagcatgtacaccttcgtgacttcccatttgccacccggcttcaacgagtacgacttcgtgcccgagagcttcgaccgggacaaaaccatcgccctgatcatgaacagtagtggcagtaccggattgcccaagggcgtagccctaccgcaccgcaccgcttgtgtccgattcagtcatgcccgcgaccccatcttcggcaaccagatcatccccgacaccgctatcctcagcgtggtgccatttcaccacggcttcggcatgttcaccacgctgggctacttgatctgcggctttcgggtcgtgctcatgtaccgcttcgaggaggagctattcttgcgcagcttgcaagactataagattcaatctgccctgctggtgcccacactatttagcttcttcgctaagagcactctcatcgacaagtacgacctaagcaacttgcacgagatcgccagcggcggggcgccgctcagcaaggaggtaggtgaggccgtggccaaacgcttccacctaccaggcatccgccagggctacggcctgacagaaacaaccagcgccattctgatcacccccgaaggggacgacaagcctggcgcagtaggcaaggtggtgcccttcttcgaggctaaggtggtggacttggacacaggtaagacactgggtgtgaaccagcgcggcgagctgtgcgtccgtggccccatgatcatgagcggctacgttaacaaccccgaggctacaaacgctctcatcgacaaggacggctggctgcacagcggcgacatcgcctactgggacgaggacgagcacttcttcatcgtggaccggctgaagagcctgatcaaatacaagggctaccaggtagccccagccgaactggagagcatcctgctgcaacaccccaacatcttcgacgccggggtcgccggcctgcccgacgacgatgccggcgagctgcccgccgcagtcgtcgtgctggaacacggtaaaaccatgaccgagaaggagatcgtggactatgtggccagccaggttacaaccgccaagaagctgcgcggtggtgttgtgttcgtggacgaggtgcctaaaggactgaccggcaagttggacgcccgcaagatccgcgagattctcattaaggccaagaagggcggcaagatcgccgtgggctccggagagggcagaggaagtctgctaacatgcggtgacgtcgaggagaatcctggcccaatggagagcgacgagagcggcctgcccgccatggagatcgagtgccgcatcaccggcaccctgaacggcgtggagttcgagctggtgggcggcggagagggcacccccgagcagggccgcatgaccaacaagatgaagagcaccaaaggcgccctgaccttcagcccctacctgctgagccacgtgatgggctacggcttctaccacttcggcacctaccccagcggctacgagaaccccttcctgcacgccatcaacaacggcggctacaccaacacccgcatcgagaagtacgaggacggcggcgtgctgcacgtgagcttcagctaccgctacgaggccggccgcgtgatcggcgacttcaaggtgatgggcaccggcttccccgaggacagcgtgatcttcaccgacaagatcatccgcagcaacgccaccgtggagcacctgcaccccatgggcgataacgatctggatggcagcttcacccgcaccttcagcctgcgcgacggcggctactacagctccgtggtggacagccacatgcacttcaagagcgccatccaccccagcatcctgcagaacgggggccccatgttcgccttccgccgcgtggaggaggatcacagcaacaccgagctgggcatcgtggagtaccagcacgccttcaagaccccggatgcagatgccggtgaagaataagagctcgctgatcagcctcgataagatacattgatgagtttggacaaaccacaactagaatgcagtgaaaaaaatgctttatttgtgaaatttgtgatgctattgctttatttgtaaccattataagctgcaataaacaagttttaattaaggtcgggcaggaagagggcctatttcccatgattccttcatatttgcatatacgatacaaggctgttagagagataattagaattaatttgactgtaaacacaaagatattagtacaaaatacgtgacgtagaaagtaataatttcttgggtagtttgcagttttaaaattatgttttaaaatggactatcatatgcttaccgtaacttgaaagtatttcgatttcttggctttatatatcttgtggaaaggacgaaacaccgnnnnnttttttaagcttttttgaattcagctgacgtgcctcggaccgctaggaacccctagtgatggagttggccactccctctctgcgcgctcgctcgctcactgaggccgggcgaccaaaggtcgcccgacgcccgggctttgcccgggcggcctcagtgagcgagcgagcgcgcag

SEQ ID NO: 259 - DNA, 3760 bp, synthetic construct
  misc_feature 1..3760: note = Description of Artificial Sequence: Syntheticpolynucleotide
  source 1..3760: mol_type = other DNA
ctgcgcgctcgctcgctcactgaggccgcccgggcgtcgggcgacctttggtcgcccggcctcagtgagcgagcgagcgcgcagagagggagtggccaactccatcactaggggttcctgcggccgcacgcgtctagatcccatatatggagttccgcgttacataacttacggtaaatggcccgcctggctgaccgcccaacgacccccgcccattgacgtcaataatgacgtatgttcccatagtaacgccaatagggactttccattgacgtcaatgggtggagtatttacggtaaactgcccacttggcagtacatcaagtgtatcatatgccaagtacgccccctattgacgtcaatgacggtaaatggcccgcctggcattatgcccagtacatgaccttatgggactttcctacttggcagtacatctacgtattagtcatcgctattaccatggtgatgcggttttggcagtacatcaatgggcgtggatagcggtttgactcacggggatttccaagtctccaccccattgacgtcaatgggagtttgttttggcaccaaaatcaacgggactttccaaaatgtcgtaacaactccgccccattgacgcaaatgggcggtaggcgtgtacggtgggaggtctatataagcagagctcgtttagtgaaccgtcagatcgcctggagacgcaccggtgccaccatggaagatgccaaaaacattaagaagggcccagcgccattctacccactcgaagacgggaccgccggcgagcagctgcacaaagccatgaagcgctacgccctggtgcccggcaccatcgcctttaccgacgcacatatcgaggtggacattacctacgccgagtacttcgagatgagcgttcggctggcagaagctatgaagcgctatgggctgaatacaaaccatcggatcgtggtgtgcagcgagaatagcttgcagttcttcatgcccgtgttgggtgccctgttcatcggtgtggctgtggccccagctaacgacatctacaacgagcgcgagctgctgaacagcatgggcatcagccagcccaccgtcgtattcgtgagcaagaaagggctgcaaaagatcctcaacgtgcaaaagaagctaccgatcatacaaaagatcatcatcatggatagcaagaccgactaccagggcttccaaagcatgtacaccttcgtgacttcccatttgccacccggcttcaacgagtacgacttcgtgcccgagagcttcgaccgggacaaaaccatcgccctgatcatgaacagtagtggcagtaccggattgcccaagggcgtagccctaccgcaccgcaccgcttgtgtccgattcagtcatgcccgcgaccccatcttcggcaaccagatcatccccgacaccgctatcctcagcgtggtgccatttcaccacggcttcggcatgttcaccacgctgggctacttgatctgcggctttcgggtcgtgctcatgtaccgcttcgaggaggagctattcttgcgcagcttgcaagactataagattcaatctgccctgctggtgcccacactatttagcttcttcgctaagagcactctcatcgacaagtacgacctaagcaacttgcacgagatcgccagcggcggggcgccgctcagcaaggaggtaggtgaggccgtggccaaacgcttccacctaccaggcatccgccagggctacggcctgacagaaacaaccagcgccattctgatcacccccgaaggggacgacaagcctggcgcagtaggcaaggtggtgcccttcttcgaggctaaggtggtggacttggacacaggtaagacactgggtgtgaaccagcgcggcgagctgtgcgtccgtggccccatgatcatgagcggctacgttaacaaccccgaggctacaaacgctctcatcgacaaggacggctggctgcacagcggcgacatcgcctactgggacgaggacgagcacttcttcatcgtggaccggctgaagagcctgatcaaatacaagggctaccaggtagccccagccgaactggagagcatcctgctgcaacaccccaacatcttcgacgccggggtcgccggcctgcccgacgacgatgccggcgagctgcccgccgcagtcgtcgtgctggaacacggtaaaaccatgaccgagaaggagatcgtggactatgtggccagccaggttacaaccgccaagaagctgcgcggtggtgttgtgttcgtggacgaggtgcctaaaggactgaccggcaagttggacgcccgcaagatccgcgagattctcattaaggccaagaagggcggcaagatcgccgtgggctccggagagggcagaggaagtctgctaacatgcggtgacgtcgaggagaatcctggcccaatggagagcgacgagagcggcctgcccgccatggagatcgagtgccgcatcaccggcaccctgaacggcgtggagttcgagctggtgggcggcggagagggcacccccgagcagggccgcatgaccaacaagatgaagagcaccaaaggcgccctgaccttcagcccctacctgctgagccacgtgatgggctacggcttctaccacttcggcacctaccccagcggctacgagaaccccttcctgcacgccatcaacaacggcggctacaccaacacccgcatcgagaagtacgaggacggcggcgtgctgcacgtgagcttcagctaccgctacgaggccggccgcgtgatcggcgacttcaaggtgatgggcaccggcttccccgaggacagcgtgatcttcaccgacaagatcatccgcagcaacgccaccgtggagcacctgcaccccatgggcgataacgatctggatggcagcttcacccgcaccttcagcctgcgcgacggcggctactacagctccgtggtggacagccacatgcacttcaagagcgccatccaccccagcatcctgcagaacgggggccccatgttcgccttccgccgcgtggaggaggatcacagcaacaccgagctgggcatcgtggagtaccagcacgccttcaagaccccggatgcagatgccggtgaagaataagagctcgctgatcagcctcgataagatacattgatgagtttggacaaaccacaactagaatgcagtgaaaaaaatgctttatttgtgaaatttgtgatgctattgctttatttgtaaccattataagctgcaataaacaagttttaattaaggtcgggcaggaagagggcctatttcccatgattccttcatatttgcatatacgatacaaggctgttagagagataattagaattaatttgactgtaaacacaaagatattagtacaaaatacgtgacgtagaaagtaataatttcttgggtagtttgcagttttaaaattatgttttaaaatggactatcatatgcttaccgtaacttgaaagtatttcgatttcttggctttatatatcttgtggaaaggacgaaacaccgtcctcatcttggaattcgtgatgcgaacatcacgaattccaagatgaggattttttaagcttttttgaattcagctgacgtgcctcggaccgctaggaacccctagtgatggagttggccactccctctctgcgcgctcgctcgctcactgaggccgggcgaccaaaggtcgcccgacgcccgggctttgcccgggcggcctcagtgagcgagcgagcgcgcag

SEQ ID NO: 260 - DNA, 3760 bp, synthetic construct
  misc_feature 1..3760: note = Description of Artificial Sequence: Syntheticpolynucleotide
  source 1..3760: mol_type = other DNA
ctgcgcgctcgctcgctcactgaggccgcccgggcgtcgggcgacctttggtcgcccggcctcagtgagcgagcgagcgcgcagagagggagtggccaactccatcactaggggttcctgcggccgcacgcgtctagatcccatatatggagttccgcgttacataacttacggtaaatggcccgcctggctgaccgcccaacgacccccgcccattgacgtcaataatgacgtatgttcccatagtaacgccaatagggactttccattgacgtcaatgggtggagtatttacggtaaactgcccacttggcagtacatcaagtgtatcatatgccaagtacgccccctattgacgtcaatgacggtaaatggcccgcctggcattatgcccagtacatgaccttatgggactttcctacttggcagtacatctacgtattagtcatcgctattaccatggtgatgcggttttggcagtacatcaatgggcgtggatagcggtttgactcacggggatttccaagtctccaccccattgacgtcaatgggagtttgttttggcaccaaaatcaacgggactttccaaaatgtcgtaacaactccgccccattgacgcaaatgggcggtaggcgtgtacggtgggaggtctatataagcagagctcgtttagtgaaccgtcagatcgcctggagacgcaccggtgccaccatggaagatgccaaaaacattaagaagggcccagcgccattctacccactcgaagacgggaccgccggcgagcagctgcacaaagccatgaagcgctacgccctggtgcccggcaccatcgcctttaccgacgcacatatcgaggtggacattacctacgccgagtacttcgagatgagcgttcggctggcagaagctatgaagcgctatgggctgaatacaaaccatcggatcgtggtgtgcagcgagaatagcttgcagttcttcatgcccgtgttgggtgccctgttcatcggtgtggctgtggccccagctaacgacatctacaacgagcgcgagctgctgaacagcatgggcatcagccagcccaccgtcgtattcgtgagcaagaaagggctgcaaaagatcctcaacgtgcaaaagaagctaccgatcatacaaaagatcatcatcatggatagcaagaccgactaccagggcttccaaagcatgtacaccttcgtgacttcccatttgccacccggcttcaacgagtacgacttcgtgcccgagagcttcgaccgggacaaaaccatcgccctgatcatgaacagtagtggcagtaccggattgcccaagggcgtagccctaccgcaccgcaccgcttgtgtccgattcagtcatgcccgcgaccccatcttcggcaaccagatcatccccgacaccgctatcctcagcgtggtgccatttcaccacggcttcggcatgttcaccacgctgggctacttgatctgcggctttcgggtcgtgctcatgtaccgcttcgaggaggagctattcttgcgcagcttgcaagactataagattcaatctgccctgctggtgcccacactatttagcttcttcgctaagagcactctcatcgacaagtacgacctaagcaacttgcacgagatcgccagcggcggggcgccgctcagcaaggaggtaggtgaggccgtggccaaacgcttccacctaccaggcatccgccagggctacggcctgacagaaacaaccagcgccattctgatcacccccgaaggggacgacaagcctggcgcagtaggcaaggtggtgcccttcttcgaggctaaggtggtggacttggacacaggtaagacactgggtgtgaaccagcgcggcgagctgtgcgtccgtggccccatgatcatgagcggctacgttaacaaccccgaggctacaaacgctctcatcgacaaggacggctggctgcacagcggcgacatcgcctactgggacgaggacgagcacttcttcatcgtggaccggctgaagagcctgatcaaatacaagggctaccaggtagccccagccgaactggagagcatcctgctgcaacaccccaacatcttcgacgccggggtcgccggcctgcccgacgacgatgccggcgagctgcccgccgcagtcgtcgtgctggaacacggtaaaaccatgaccgagaaggagatcgtggactatgtggccagccaggttacaaccgccaagaagctgcgcggtggtgttgtgttcgtggacgaggtgcctaaaggactgaccggcaagttggacgcccgcaagatccgcgagattctcattaaggccaagaagggcggcaagatcgccgtgggctccggagagggcagaggaagtctgctaacatgcggtgacgtcgaggagaatcctggcccaatggagagcgacgagagcggcctgcccgccatggagatcgagtgccgcatcaccggcaccctgaacggcgtggagttcgagctggtgggcggcggagagggcacccccgagcagggccgcatgaccaacaagatgaagagcaccaaaggcgccctgaccttcagcccctacctgctgagccacgtgatgggctacggcttctaccacttcggcacctaccccagcggctacgagaaccccttcctgcacgccatcaacaacggcggctacaccaacacccgcatcgagaagtacgaggacggcggcgtgctgcacgtgagcttcagctaccgctacgaggccggccgcgtgatcggcgacttcaaggtgatgggcaccggcttccccgaggacagcgtgatcttcaccgacaagatcatccgcagcaacgccaccgtggagcacctgcaccccatgggcgataacgatctggatggcagcttcacccgcaccttcagcctgcgcgacggcggctactacagctccgtggtggacagccacatgcacttcaagagcgccatccaccccagcatcctgcagaacgggggccccatgttcgccttccgccgcgtggaggaggatcacagcaacaccgagctgggcatcgtggagtaccagcacgccttcaagaccccggatgcagatgccggtgaagaataagagctcgctgatcagcctcgataagatacattgatgagtttggacaaaccacaactagaatgcagtgaaaaaaatgctttatttgtgaaatttgtgatgctattgctttatttgtaaccattataagctgcaataaacaagttttaattaaggtcgggcaggaagagggcctatttcccatgattccttcatatttgcatatacgatacaaggctgttagagagataattagaattaatttgactgtaaacacaaagatattagtacaaaatacgtgacgtagaaagtaataatttcttgggtagtttgcagttttaaaattatgttttaaaatggactatcatatgcttaccgtaacttgaaagtatttcgatttcttggctttatatatcttgtggaaaggacgaaacaccgcgccttactgggcatctctttctcgaaagaaagagatgcccagtaaggcgttttttaagcttttttgaattcagctgacgtgcctcggaccgctaggaacccctagtgatggagttggccactccctctctgcgcgctcgctcgctcactgaggccgggcgaccaaaggtcgcccgacgcccgggctttgcccgggcggcctcagtgagcgagcgagcgcgcag

SEQ ID NO: 261 - DNA, 3756 bp, synthetic construct
  misc_feature 1..3756: note = Description of Artificial Sequence: Syntheticpolynucleotide
  source 1..3756: mol_type = other DNA
ctgcgcgctcgctcgctcactgaggccgcccgggcgtcgggcgacctttggtcgcccggcctcagtgagcgagcgagcgcgcagagagggagtggccaactccatcactaggggttcctgcggccgcacgcgtctagatcccatatatggagttccgcgttacataacttacggtaaatggcccgcctggctgaccgcccaacgacccccgcccattgacgtcaataatgacgtatgttcccatagtaacgccaatagggactttccattgacgtcaatgggtggagtatttacggtaaactgcccacttggcagtacatcaagtgtatcatatgccaagtacgccccctattgacgtcaatgacggtaaatggcccgcctggcattatgcccagtacatgaccttatgggactttcctacttggcagtacatctacgtattagtcatcgctattaccatggtgatgcggttttggcagtacatcaatgggcgtggatagcggtttgactcacggggatttccaagtctccaccccattgacgtcaatgggagtttgttttggcaccaaaatcaacgggactttccaaaatgtcgtaacaactccgccccattgacgcaaatgggcggtaggcgtgtacggtgggaggtctatataagcagagctcgtttagtgaaccgtcagatcgcctggagacgcaccggtgccaccatggaagatgccaaaaacattaagaagggcccagcgccattctacccactcgaagacgggaccgccggcgagcagctgcacaaagccatgaagcgctacgccctggtgcccggcaccatcgcctttaccgacgcacatatcgaggtggacattacctacgccgagtacttcgagatgagcgttcggctggcagaagctatgaagcgctatgggctgaatacaaaccatcggatcgtggtgtgcagcgagaatagcttgcagttcttcatgcccgtgttgggtgccctgttcatcggtgtggctgtggccccagctaacgacatctacaacgagcgcgagctgctgaacagcatgggcatcagccagcccaccgtcgtattcgtgagcaagaaagggctgcaaaagatcctcaacgtgcaaaagaagctaccgatcatacaaaagatcatcatcatggatagcaagaccgactaccagggcttccaaagcatgtacaccttcgtgacttcccatttgccacccggcttcaacgagtacgacttcgtgcccgagagcttcgaccgggacaaaaccatcgccctgatcatgaacagtagtggcagtaccggattgcccaagggcgtagccctaccgcaccgcaccgcttgtgtccgattcagtcatgcccgcgaccccatcttcggcaaccagatcatccccgacaccgctatcctcagcgtggtgccatttcaccacggcttcggcatgttcaccacgctgggctacttgatctgcggctttcgggtcgtgctcatgtaccgcttcgaggaggagctattcttgcgcagcttgcaagactataagattcaatctgccctgctggtgcccacactatttagcttcttcgctaagagcactctcatcgacaagtacgacctaagcaacttgcacgagatcgccagcggcggggcgccgctcagcaaggaggtaggtgaggccgtggccaaacgcttccacctaccaggcatccgccagggctacggcctgacagaaacaaccagcgccattctgatcacccccgaaggggacgacaagcctggcgcagtaggcaaggtggtgcccttcttcgaggctaaggtggtggacttggacacaggtaagacactgggtgtgaaccagcgcggcgagctgtgcgtccgtggccccatgatcatgagcggctacgttaacaaccccgaggctacaaacgctctcatcgacaaggacggctggctgcacagcggcgacatcgcctactgggacgaggacgagcacttcttcatcgtggaccggctgaagagcctgatcaaatacaagggctaccaggtagccccagccgaactggagagcatcctgctgcaacaccccaacatcttcgacgccggggtcgccggcctgcccgacgacgatgccggcgagctgcccgccgcagtcgtcgtgctggaacacggtaaaaccatgaccgagaaggagatcgtggactatgtggccagccaggttacaaccgccaagaagctgcgcggtggtgttgtgttcgtggacgaggtgcctaaaggactgaccggcaagttggacgcccgcaagatccgcgagattctcattaaggccaagaagggcggcaagatcgccgtgggctccggagagggcagaggaagtctgctaacatgcggtgacgtcgaggagaatcctggcccaatggagagcgacgagagcggcctgcccgccatggagatcgagtgccgcatcaccggcaccctgaacggcgtggagttcgagctggtgggcggcggagagggcacccccgagcagggccgcatgaccaacaagatgaagagcaccaaaggcgccctgaccttcagcccctacctgctgagccacgtgatgggctacggcttctaccacttcggcacctaccccagcggctacgagaaccccttcctgcacgccatcaacaacggcggctacaccaacacccgcatcgagaagtacgaggacggcggcgtgctgcacgtgagcttcagctaccgctacgaggccggccgcgtgatcggcgacttcaaggtgatgggcaccggcttccccgaggacagcgtgatcttcaccgacaagatcatccgcagcaacgccaccgtggagcacctgcaccccatgggcgataacgatctggatggcagcttcacccgcaccttcagcctgcgcgacggcggctactacagctccgtggtggacagccacatgcacttcaagagcgccatccaccccagcatcctgcagaacgggggccccatgttcgccttccgccgcgtggaggaggatcacagcaacaccgagctgggcatcgtggagtaccagcacgccttcaagaccccggatgcagatgccggtgaagaataagagctcgctgatcagcctcgataagatacattgatgagtttggacaaaccacaactagaatgcagtgaaaaaaatgctttatttgtgaaatttgtgatgctattgctttatttgtaaccattataagctgcaataaacaagttttaattaaggtcgggcaggaagagggcctatttcccatgattccttcatatttgcatatacgatacaaggctgttagagagataattagaattaatttgactgtaaacacaaagatattagtacaaaatacgtgacgtagaaagtaataatttcttgggtagtttgcagttttaaaattatgttttaaaatggactatcatatgcttaccgtaacttgaaagtatttcgatttcttggctttatatatcttgtggaaaggacgaaacaccgctggtactactatgacagtatcgaaatactgtcatagtagtaccagttttttaagcttttttgaattcagctgacgtgcctcggaccgctaggaacccctagtgatggagttggccactccctctctgcgcgctcgctcgctcactgaggccgggcgaccaaaggtcgcccgacgcccgggctttgcccgggcggcctcagtgagcgagcgagcgcgcag

SEQ ID NO: 262 - DNA, 3756 bp, synthetic construct
  misc_feature 1..3756: note = Description of Artificial Sequence: Syntheticpolynucleotide
  source 1..3756: mol_type = other DNA
ctgcgcgctcgctcgctcactgaggccgcccgggcgtcgggcgacctttggtcgcccggcctcagtgagcgagcgagcgcgcagagagggagtggccaactccatcactaggggttcctgcggccgcacgcgtctagatcccatatatggagttccgcgttacataacttacggtaaatggcccgcctggctgaccgcccaacgacccccgcccattgacgtcaataatgacgtatgttcccatagtaacgccaatagggactttccattgacgtcaatgggtggagtatttacggtaaactgcccacttggcagtacatcaagtgtatcatatgccaagtacgccccctattgacgtcaatgacggtaaatggcccgcctggcattatgcccagtacatgaccttatgggactttcctacttggcagtacatctacgtattagtcatcgctattaccatggtgatgcggttttggcagtacatcaatgggcgtggatagcggtttgactcacggggatttccaagtctccaccccattgacgtcaatgggagtttgttttggcaccaaaatcaacgggactttccaaaatgtcgtaacaactccgccccattgacgcaaatgggcggtaggcgtgtacggtgggaggtctatataagcagagctcgtttagtgaaccgtcagatcgcctggagacgcaccggtgccaccatggaagatgccaaaaacattaagaagggcccagcgccattctacccactcgaagacgggaccgccggcgagcagctgcacaaagccatgaagcgctacgccctggtgcccggcaccatcgcctttaccgacgcacatatcgaggtggacattacctacgccgagtacttcgagatgagcgttcggctggcagaagctatgaagcgctatgggctgaatacaaaccatcggatcgtggtgtgcagcgagaatagcttgcagttcttcatgcccgtgttgggtgccctgttcatcggtgtggctgtggccccagctaacgacatctacaacgagcgcgagctgctgaacagcatgggcatcagccagcccaccgtcgtattcgtgagcaagaaagggctgcaaaagatcctcaacgtgcaaaagaagctaccgatcatacaaaagatcatcatcatggatagcaagaccgactaccagggcttccaaagcatgtacaccttcgtgacttcccatttgccacccggcttcaacgagtacgacttcgtgcccgagagcttcgaccgggacaaaaccatcgccctgatcatgaacagtagtggcagtaccggattgcccaagggcgtagccctaccgcaccgcaccgcttgtgtccgattcagtcatgcccgcgaccccatcttcggcaaccagatcatccccgacaccgctatcctcagcgtggtgccatttcaccacggcttcggcatgttcaccacgctgggctacttgatctgcggctttcgggtcgtgctcatgtaccgcttcgaggaggagctattcttgcgcagcttgcaagactataagattcaatctgccctgctggtgcccacactatttagcttcttcgctaagagcactctcatcgacaagtacgacctaagcaacttgcacgagatcgccagcggcggggcgccgctcagcaaggaggtaggtgaggccgtggccaaacgcttccacctaccaggcatccgccagggctacggcctgacagaaacaaccagcgccattctgatcacccccgaaggggacgacaagcctggcgcagtaggcaaggtggtgcccttcttcgaggctaaggtggtggacttggacacaggtaagacactgggtgtgaaccagcgcggcgagctgtgcgtccgtggccccatgatcatgagcggctacgttaacaaccccgaggctacaaacgctctcatcgacaaggacggctggctgcacagcggcgacatcgcctactgggacgaggacgagcacttcttcatcgtggaccggctgaagagcctgatcaaatacaagggctaccaggtagccccagccgaactggagagcatcctgctgcaacaccccaacatcttcgacgccggggtcgccggcctgcccgacgacgatgccggcgagctgcccgccgcagtcgtcgtgctggaacacggtaaaaccatgaccgagaaggagatcgtggactatgtggccagccaggttacaaccgccaagaagctgcgcggtggtgttgtgttcgtggacgaggtgcctaaaggactgaccggcaagttggacgcccgcaagatccgcgagattctcattaaggccaagaagggcggcaagatcgccgtgggctccggagagggcagaggaagtctgctaacatgcggtgacgtcgaggagaatcctggcccaatggagagcgacgagagcggcctgcccgccatggagatcgagtgccgcatcaccggcaccctgaacggcgtggagttcgagctggtgggcggcggagagggcacccccgagcagggccgcatgaccaacaagatgaagagcaccaaaggcgccctgaccttcagcccctacctgctgagccacgtgatgggctacggcttctaccacttcggcacctaccccagcggctacgagaaccccttcctgcacgccatcaacaacggcggctacaccaacacccgcatcgagaagtacgaggacggcggcgtgctgcacgtgagcttcagctaccgctacgaggccggccgcgtgatcggcgacttcaaggtgatgggcaccggcttccccgaggacagcgtgatcttcaccgacaagatcatccgcagcaacgccaccgtggagcacctgcaccccatgggcgataacgatctggatggcagcttcacccgcaccttcagcctgcgcgacggcggctactacagctccgtggtggacagccacatgcacttcaagagcgccatccaccccagcatcctgcagaacgggggccccatgttcgccttccgccgcgtggaggaggatcacagcaacaccgagctgggcatcgtggagtaccagcacgccttcaagaccccggatgcagatgccggtgaagaataagagctcgctgatcagcctcgataagatacattgatgagtttggacaaaccacaactagaatgcagtgaaaaaaatgctttatttgtgaaatttgtgatgctattgctttatttgtaaccattataagctgcaataaacaagttttaattaaggtcgggcaggaagagggcctatttcccatgattccttcatatttgcatatacgatacaaggctgttagagagataattagaattaatttgactgtaaacacaaagatattagtacaaaatacgtgacgtagaaagtaataatttcttgggtagtttgcagttttaaaattatgttttaaaatggactatcatatgcttaccgtaacttgaaagtatttcgatttcttggctttatatatcttgtggaaaggacgaaacaccgaagtagcagaggagaagagctcgaaagctcttctcctctgctacttttttttaagcttttttgaattcagctgacgtgcctcggaccgctaggaacccctagtgatggagttggccactccctctctgcgcgctcgctcgctcactgaggccgggcgaccaaaggtcgcccgacgcccgggctttgcccgggcggcctcagtgagcgagcgagcgcgcag

SEQ ID NO: 263 - DNA, 3755 bp, synthetic construct
  misc_feature 1..3755: note = Description of Artificial Sequence: Syntheticpolynucleotide
  source 1..3755: mol_type = other DNA
ctgcgcgctcgctcgctcactgaggccgcccgggcgtcgggcgacctttggtcgcccggcctcagtgagcgagcgagcgcgcagagagggagtggccaactccatcactaggggttcctgcggccgcacgcgtctagatcccatatatggagttccgcgttacataacttacggtaaatggcccgcctggctgaccgcccaacgacccccgcccattgacgtcaataatgacgtatgttcccatagtaacgccaatagggactttccattgacgtcaatgggtggagtatttacggtaaactgcccacttggcagtacatcaagtgtatcatatgccaagtacgccccctattgacgtcaatgacggtaaatggcccgcctggcattatgcccagtacatgaccttatgggactttcctacttggcagtacatctacgtattagtcatcgctattaccatggtgatgcggttttggcagtacatcaatgggcgtggatagcggtttgactcacggggatttccaagtctccaccccattgacgtcaatgggagtttgttttggcaccaaaatcaacgggactttccaaaatgtcgtaacaactccgccccattgacgcaaatgggcggtaggcgtgtacggtgggaggtctatataagcagagctcgtttagtgaaccgtcagatcgcctggagacgcaccggtgccaccatggaagatgccaaaaacattaagaagggcccagcgccattctacccactcgaagacgggaccgccggcgagcagctgcacaaagccatgaagcgctacgccctggtgcccggcaccatcgcctttaccgacgcacatatcgaggtggacattacctacgccgagtacttcgagatgagcgttcggctggcagaagctatgaagcgctatgggctgaatacaaaccatcggatcgtggtgtgcagcgagaatagcttgcagttcttcatgcccgtgttgggtgccctgttcatcggtgtggctgtggccccagctaacgacatctacaacgagcgcgagctgctgaacagcatgggcatcagccagcccaccgtcgtattcgtgagcaagaaagggctgcaaaagatcctcaacgtgcaaaagaagctaccgatcatacaaaagatcatcatcatggatagcaagaccgactaccagggcttccaaagcatgtacaccttcgtgacttcccatttgccacccggcttcaacgagtacgacttcgtgcccgagagcttcgaccgggacaaaaccatcgccctgatcatgaacagtagtggcagtaccggattgcccaagggcgtagccctaccgcaccgcaccgcttgtgtccgattcagtcatgcccgcgaccccatcttcggcaaccagatcatccccgacaccgctatcctcagcgtggtgccatttcaccacggcttcggcatgttcaccacgctgggctacttgatctgcggctttcgggtcgtgctcatgtaccgcttcgaggaggagctattcttgcgcagcttgcaagactataagattcaatctgccctgctggtgcccacactatttagcttcttcgctaagagcactctcatcgacaagtacgacctaagcaacttgcacgagatcgccagcggcggggcgccgctcagcaaggaggtaggtgaggccgtggccaaacgcttccacctaccaggcatccgccagggctacggcctgacagaaacaaccagcgccattctgatcacccccgaaggggacgacaagcctggcgcagtaggcaaggtggtgcccttcttcgaggctaaggtggtggacttggacacaggtaagacactgggtgtgaaccagcgcggcgagctgtgcgtccgtggccccatgatcatgagcggctacgttaacaaccccgaggctacaaacgctctcatcgacaaggacggctggctgcacagcggcgacatcgcctactgggacgaggacgagcacttcttcatcgtggaccggctgaagagcctgatcaaatacaagggctaccaggtagccccagccgaactggagagcatcctgctgcaacaccccaacatcttcgacgccggggtcgccggcctgcccgacgacgatgccggcgagctgcccgccgcagtcgtcgtgctggaacacggtaaaaccatgaccgagaaggagatcgtggactatgtggccagccaggttacaaccgccaagaagctgcgcggtggtgttgtgttcgtggacgaggtgcctaaaggactgaccggcaagttggacgcccgcaagatccgcgagattctcattaaggccaagaagggcggcaagatcgccgtgggctccggagagggcagaggaagtctgctaacatgcggtgacgtcgaggagaatcctggcccaatggagagcgacgagagcggcctgcccgccatggagatcgagtgccgcatcaccggcaccctgaacggcgtggagttcgagctggtgggcggcggagagggcacccccgagcagggccgcatgaccaacaagatgaagagcaccaaaggcgccctgaccttcagcccctacctgctgagccacgtgatgggctacggcttctaccacttcggcacctaccccagcggctacgagaaccccttcctgcacgccatcaacaacggcggctacaccaacacccgcatcgagaagtacgaggacggcggcgtgctgcacgtgagcttcagctaccgctacgaggccggccgcgtgatcggcgacttcaaggtgatgggcaccggcttccccgaggacagcgtgatcttcaccgacaagatcatccgcagcaacgccaccgtggagcacctgcaccccatgggcgataacgatctggatggcagcttcacccgcaccttcagcctgcgcgacggcggctactacagctccgtggtggacagccacatgcacttcaagagcgccatccaccccagcatcctgcagaacgggggccccatgttcgccttccgccgcgtggaggaggatcacagcaacaccgagctgggcatcgtggagtaccagcacgccttcaagaccccggatgcagatgccggtgaagaataagagctcgctgatcagcctcgataagatacattgatgagtttggacaaaccacaactagaatgcagtgaaaaaaatgctttatttgtgaaatttgtgatgctattgctttatttgtaaccattataagctgcaataaacaagttttaattaaggtcgggcaggaagagggcctatttcccatgattccttcatatttgcatatacgatacaaggctgttagagagataattagaattaatttgactgtaaacacaaagatattagtacaaaatacgtgacgtagaaagtaataatttcttgggtagtttgcagttttaaaattatgttttaaaatggactatcatatgcttaccgtaacttgaaagtatttcgatttcttggctttatatatcttgtggaaaggacgaaacaccgaagacagtcatccgctccatccgaagatggagcggatgactgtcttttttttaagcttttttgaattcagctgacgtgcctcggaccgctaggaacccctagtgatggagttggccactccctctctgcgcgctcgctcgctcactgaggccgggcgaccaaaggtcgcccgacgcccgggctttgcccgggcggcctcagtgagcgagcgagcgcgca

SEQ ID NO: 264 - DNA, 3756 bp, synthetic construct
  misc_feature 1..3756: note = Description of Artificial Sequence: Syntheticpolynucleotide
  source 1..3756: mol_type = other DNA
ctgcgcgctcgctcgctcactgaggccgcccgggcgtcgggcgacctttggtcgcccggcctcagtgagcgagcgagcgcgcagagagggagtggccaactccatcactaggggttcctgcggccgcacgcgtctagatcccatatatggagttccgcgttacataacttacggtaaatggcccgcctggctgaccgcccaacgacccccgcccattgacgtcaataatgacgtatgttcccatagtaacgccaatagggactttccattgacgtcaatgggtggagtatttacggtaaactgcccacttggcagtacatcaagtgtatcatatgccaagtacgccccctattgacgtcaatgacggtaaatggcccgcctggcattatgcccagtacatgaccttatgggactttcctacttggcagtacatctacgtattagtcatcgctattaccatggtgatgcggttttggcagtacatcaatgggcgtggatagcggtttgactcacggggatttccaagtctccaccccattgacgtcaatgggagtttgttttggcaccaaaatcaacgggactttccaaaatgtcgtaacaactccgccccattgacgcaaatgggcggtaggcgtgtacggtgggaggtctatataagcagagctcgtttagtgaaccgtcagatcgcctggagacgcaccggtgccaccatggaagatgccaaaaacattaagaagggcccagcgccattctacccactcgaagacgggaccgccggcgagcagctgcacaaagccatgaagcgctacgccctggtgcccggcaccatcgcctttaccgacgcacatatcgaggtggacattacctacgccgagtacttcgagatgagcgttcggctggcagaagctatgaagcgctatgggctgaatacaaaccatcggatcgtggtgtgcagcgagaatagcttgcagttcttcatgcccgtgttgggtgccctgttcatcggtgtggctgtggccccagctaacgacatctacaacgagcgcgagctgctgaacagcatgggcatcagccagcccaccgtcgtattcgtgagcaagaaagggctgcaaaagatcctcaacgtgcaaaagaagctaccgatcatacaaaagatcatcatcatggatagcaagaccgactaccagggcttccaaagcatgtacaccttcgtgacttcccatttgccacccggcttcaacgagtacgacttcgtgcccgagagcttcgaccgggacaaaaccatcgccctgatcatgaacagtagtggcagtaccggattgcccaagggcgtagccctaccgcaccgcaccgcttgtgtccgattcagtcatgcccgcgaccccatcttcggcaaccagatcatccccgacaccgctatcctcagcgtggtgccatttcaccacggcttcggcatgttcaccacgctgggctacttgatctgcggctttcgggtcgtgctcatgtaccgcttcgaggaggagctattcttgcgcagcttgcaagactataagattcaatctgccctgctggtgcccacactatttagcttcttcgctaagagcactctcatcgacaagtacgacctaagcaacttgcacgagatcgccagcggcggggcgccgctcagcaaggaggtaggtgaggccgtggccaaacgcttccacctaccaggcatccgccagggctacggcctgacagaaacaaccagcgccattctgatcacccccgaaggggacgacaagcctggcgcagtaggcaaggtggtgcccttcttcgaggctaaggtggtggacttggacacaggtaagacactgggtgtgaaccagcgcggcgagctgtgcgtccgtggccccatgatcatgagcggctacgttaacaaccccgaggctacaaacgctctcatcgacaaggacggctggctgcacagcggcgacatcgcctactgggacgaggacgagcacttcttcatcgtggaccggctgaagagcctgatcaaatacaagggctaccaggtagccccagccgaactggagagcatcctgctgcaacaccccaacatcttcgacgccggggtcgccggcctgcccgacgacgatgccggcgagctgcccgccgcagtcgtcgtgctggaacacggtaaaaccatgaccgagaaggagatcgtggactatgtggccagccaggttacaaccgccaagaagctgcgcggtggtgttgtgttcgtggacgaggtgcctaaaggactgaccggcaagttggacgcccgcaagatccgcgagattctcattaaggccaagaagggcggcaagatcgccgtgggctccggagagggcagaggaagtctgctaacatgcggtgacgtcgaggagaatcctggcccaatggagagcgacgagagcggcctgcccgccatggagatcgagtgccgcatcaccggcaccctgaacggcgtggagttcgagctggtgggcggcggagagggcacccccgagcagggccgcatgaccaacaagatgaagagcaccaaaggcgccctgaccttcagcccctacctgctgagccacgtgatgggctacggcttctaccacttcggcacctaccccagcggctacgagaaccccttcctgcacgccatcaacaacggcggctacaccaacacccgcatcgagaagtacgaggacggcggcgtgctgcacgtgagcttcagctaccgctacgaggccggccgcgtgatcggcgacttcaaggtgatgggcaccggcttccccgaggacagcgtgatcttcaccgacaagatcatccgcagcaacgccaccgtggagcacctgcaccccatgggcgataacgatctggatggcagcttcacccgcaccttcagcctgcgcgacggcggctactacagctccgtggtggacagccacatgcacttcaagagcgccatccaccccagcatcctgcagaacgggggccccatgttcgccttccgccgcgtggaggaggatcacagcaacaccgagctgggcatcgtggagtaccagcacgccttcaagaccccggatgcagatgccggtgaagaataagagctcgctgatcagcctcgataagatacattgatgagtttggacaaaccacaactagaatgcagtgaaaaaaatgctttatttgtgaaatttgtgatgctattgctttatttgtaaccattataagctgcaataaacaagttttaattaaggtcgggcaggaagagggcctatttcccatgattccttcatatttgcatatacgatacaaggctgttagagagataattagaattaatttgactgtaaacacaaagatattagtacaaaatacgtgacgtagaaagtaataatttcttgggtagtttgcagttttaaaattatgttttaaaatggactatcatatgcttaccgtaacttgaaagtatttcgatttcttggctttatatatcttgtggaaaggacgaaacaccgaaggacgtcattgagcagtaccgaagtactgctcaatgacgtccttttttttaagcttttttgaattcagctgacgtgcctcggaccgctaggaacccctagtgatggagttggccactccctctctgcgcgctcgctcgctcactgaggccgggcgaccaaaggtcgcccgacgcccgggctttgcccgggcggcctcagtgagcgagcgagcgcgcag

SEQ ID NO: 265 - DNA, 3756 bp, synthetic construct
  misc_feature 1..3756: note = Description of Artificial Sequence: Syntheticpolynucleotide
  source 1..3756: mol_type = other DNA
ctgcgcgctcgctcgctcactgaggccgcccgggcgtcgggcgacctttggtcgcccggcctcagtgagcgagcgagcgcgcagagagggagtggccaactccatcactaggggttcctgcggccgcacgcgtctagatcccatatatggagttccgcgttacataacttacggtaaatggcccgcctggctgaccgcccaacgacccccgcccattgacgtcaataatgacgtatgttcccatagtaacgccaatagggactttccattgacgtcaatgggtggagtatttacggtaaactgcccacttggcagtacatcaagtgtatcatatgccaagtacgccccctattgacgtcaatgacggtaaatggcccgcctggcattatgcccagtacatgaccttatgggactttcctacttggcagtacatctacgtattagtcatcgctattaccatggtgatgcggttttggcagtacatcaatgggcgtggatagcggtttgactcacggggatttccaagtctccaccccattgacgtcaatgggagtttgttttggcaccaaaatcaacgggactttccaaaatgtcgtaacaactccgccccattgacgcaaatgggcggtaggcgtgtacggtgggaggtctatataagcagagctcgtttagtgaaccgtcagatcgcctggagacgcaccggtgccaccatggaagatgccaaaaacattaagaagggcccagcgccattctacccactcgaagacgggaccgccggcgagcagctgcacaaagccatgaagcgctacgccctggtgcccggcaccatcgcctttaccgacgcacatatcgaggtggacattacctacgccgagtacttcgagatgagcgttcggctggcagaagctatgaagcgctatgggctgaatacaaaccatcggatcgtggtgtgcagcgagaatagcttgcagttcttcatgcccgtgttgggtgccctgttcatcggtgtggctgtggccccagctaacgacatctacaacgagcgcgagctgctgaacagcatgggcatcagccagcccaccgtcgtattcgtgagcaagaaagggctgcaaaagatcctcaacgtgcaaaagaagctaccgatcatacaaaagatcatcatcatggatagcaagaccgactaccagggcttccaaagcatgtacaccttcgtgacttcccatttgccacccggcttcaacgagtacgacttcgtgcccgagagcttcgaccgggacaaaaccatcgccctgatcatgaacagtagtggcagtaccggattgcccaagggcgtagccctaccgcaccgcaccgcttgtgtccgattcagtcatgcccgcgaccccatcttcggcaaccagatcatccccgacaccgctatcctcagcgtggtgccatttcaccacggcttcggcatgttcaccacgctgggctacttgatctgcggctttcgggtcgtgctcatgtaccgcttcgaggaggagctattcttgcgcagcttgcaagactataagattcaatctgccctgctggtgcccacactatttagcttcttcgctaagagcactctcatcgacaagtacgacctaagcaacttgcacgagatcgccagcggcggggcgccgctcagcaaggaggtaggtgaggccgtggccaaacgcttccacctaccaggcatccgccagggctacggcctgacagaaacaaccagcgccattctgatcacccccgaaggggacgacaagcctggcgcagtaggcaaggtggtgcccttcttcgaggctaaggtggtggacttggacacaggtaagacactgggtgtgaaccagcgcggcgagctgtgcgtccgtggccccatgatcatgagcggctacgttaacaaccccgaggctacaaacgctctcatcgacaaggacggctggctgcacagcggcgacatcgcctactgggacgaggacgagcacttcttcatcgtggaccggctgaagagcctgatcaaatacaagggctaccaggtagccccagccgaactggagagcatcctgctgcaacaccccaacatcttcgacgccggggtcgccggcctgcccgacgacgatgccggcgagctgcccgccgcagtcgtcgtgctggaacacggtaaaaccatgaccgagaaggagatcgtggactatgtggccagccaggttacaaccgccaagaagctgcgcggtggtgttgtgttcgtggacgaggtgcctaaaggactgaccggcaagttggacgcccgcaagatccgcgagattctcattaaggccaagaagggcggcaagatcgccgtgggctccggagagggcagaggaagtctgctaacatgcggtgacgtcgaggagaatcctggcccaatggagagcgacgagagcggcctgcccgccatggagatcgagtgccgcatcaccggcaccctgaacggcgtggagttcgagctggtgggcggcggagagggcacccccgagcagggccgcatgaccaacaagatgaagagcaccaaaggcgccctgaccttcagcccctacctgctgagccacgtgatgggctacggcttctaccacttcggcacctaccccagcggctacgagaaccccttcctgcacgccatcaacaacggcggctacaccaacacccgcatcgagaagtacgaggacggcggcgtgctgcacgtgagcttcagctaccgctacgaggccggccgcgtgatcggcgacttcaaggtgatgggcaccggcttccccgaggacagcgtgatcttcaccgacaagatcatccgcagcaacgccaccgtggagcacctgcaccccatgggcgataacgatctggatggcagcttcacccgcaccttcagcctgcgcgacggcggctactacagctccgtggtggacagccacatgcacttcaagagcgccatccaccccagcatcctgcagaacgggggccccatgttcgccttccgccgcgtggaggaggatcacagcaacaccgagctgggcatcgtggagtaccagcacgccttcaagaccccggatgcagatgccggtgaagaataagagctcgctgatcagcctcgataagatacattgatgagtttggacaaaccacaactagaatgcagtgaaaaaaatgctttatttgtgaaatttgtgatgctattgctttatttgtaaccattataagctgcaataaacaagttttaattaaggtcgggcaggaagagggcctatttcccatgattccttcatatttgcatatacgatacaaggctgttagagagataattagaattaatttgactgtaaacacaaagatattagtacaaaatacgtgacgtagaaagtaataatttcttgggtagtttgcagttttaaaattatgttttaaaatggactatcatatgcttaccgtaacttgaaagtatttcgatttcttggctttatatatcttgtggaaaggacgaaacaccggccggatcaagagcctgcaaacgaatttgcaggctcttgatccggcttttttaagcttttttgaattcagctgacgtgcctcggaccgctaggaacccctagtgatggagttggccactccctctctgcgcgctcgctcgctcactgaggccgggcgaccaaaggtcgcccgacgcccgggctttgcccgggcggcctcagtgagcgagcgagcgcgcag

SEQ ID NO: 266 - DNA, 3756 bp, synthetic construct
  misc_feature 1..3756: note = Description of Artificial Sequence: Syntheticpolynucleotide
  source 1..3756: mol_type = other DNA
ctgcgcgctcgctcgctcactgaggccgcccgggcgtcgggcgacctttggtcgcccggcctcagtgagcgagcgagcgcgcagagagggagtggccaactccatcactaggggttcctgcggccgcacgcgtctagatcccatatatggagttccgcgttacataacttacggtaaatggcccgcctggctgaccgcccaacgacccccgcccattgacgtcaataatgacgtatgttcccatagtaacgccaatagggactttccattgacgtcaatgggtggagtatttacggtaaactgcccacttggcagtacatcaagtgtatcatatgccaagtacgccccctattgacgtcaatgacggtaaatggcccgcctggcattatgcccagtacatgaccttatgggactttcctacttggcagtacatctacgtattagtcatcgctattaccatggtgatgcggttttggcagtacatcaatgggcgtggatagcggtttgactcacggggatttccaagtctccaccccattgacgtcaatgggagtttgttttggcaccaaaatcaacgggactttccaaaatgtcgtaacaactccgccccattgacgcaaatgggcggtaggcgtgtacggtgggaggtctatataagcagagctcgtttagtgaaccgtcagatcgcctggagacgcaccggtgccaccatggaagatgccaaaaacattaagaagggcccagcgccattctacccactcgaagacgggaccgccggcgagcagctgcacaaagccatgaagcgctacgccctggtgcccggcaccatcgcctttaccgacgcacatatcgaggtggacattacctacgccgagtacttcgagatgagcgttcggctggcagaagctatgaagcgctatgggctgaatacaaaccatcggatcgtggtgtgcagcgagaatagcttgcagttcttcatgcccgtgttgggtgccctgttcatcggtgtggctgtggccccagctaacgacatctacaacgagcgcgagctgctgaacagcatgggcatcagccagcccaccgtcgtattcgtgagcaagaaagggctgcaaaagatcctcaacgtgcaaaagaagctaccgatcatacaaaagatcatcatcatggatagcaagaccgactaccagggcttccaaagcatgtacaccttcgtgacttcccatttgccacccggcttcaacgagtacgacttcgtgcccgagagcttcgaccgggacaaaaccatcgccctgatcatgaacagtagtggcagtaccggattgcccaagggcgtagccctaccgcaccgcaccgcttgtgtccgattcagtcatgcccgcgaccccatcttcggcaaccagatcatccccgacaccgctatcctcagcgtggtgccatttcaccacggcttcggcatgttcaccacgctgggctacttgatctgcggctttcgggtcgtgctcatgtaccgcttcgaggaggagctattcttgcgcagcttgcaagactataagattcaatctgccctgctggtgcccacactatttagcttcttcgctaagagcactctcatcgacaagtacgacctaagcaacttgcacgagatcgccagcggcggggcgccgctcagcaaggaggtaggtgaggccgtggccaaacgcttccacctaccaggcatccgccagggctacggcctgacagaaacaaccagcgccattctgatcacccccgaaggggacgacaagcctggcgcagtaggcaaggtggtgcccttcttcgaggctaaggtggtggacttggacacaggtaagacactgggtgtgaaccagcgcggcgagctgtgcgtccgtggccccatgatcatgagcggctacgttaacaaccccgaggctacaaacgctctcatcgacaaggacggctggctgcacagcggcgacatcgcctactgggacgaggacgagcacttcttcatcgtggaccggctgaagagcctgatcaaatacaagggctaccaggtagccccagccgaactggagagcatcctgctgcaacaccccaacatcttcgacgccggggtcgccggcctgcccgacgacgatgccggcgagctgcccgccgcagtcgtcgtgctggaacacggtaaaaccatgaccgagaaggagatcgtggactatgtggccagccaggttacaaccgccaagaagctgcgcggtggtgttgtgttcgtggacgaggtgcctaaaggactgaccggcaagttggacgcccgcaagatccgcgagattctcattaaggccaagaagggcggcaagatcgccgtgggctccggagagggcagaggaagtctgctaacatgcggtgacgtcgaggagaatcctggcccaatggagagcgacgagagcggcctgcccgccatggagatcgagtgccgcatcaccggcaccctgaacggcgtggagttcgagctggtgggcggcggagagggcacccccgagcagggccgcatgaccaacaagatgaagagcaccaaaggcgccctgaccttcagcccctacctgctgagccacgtgatgggctacggcttctaccacttcggcacctaccccagcggctacgagaaccccttcctgcacgccatcaacaacggcggctacaccaacacccgcatcgagaagtacgaggacggcggcgtgctgcacgtgagcttcagctaccgctacgaggccggccgcgtgatcggcgacttcaaggtgatgggcaccggcttccccgaggacagcgtgatcttcaccgacaagatcatccgcagcaacgccaccgtggagcacctgcaccccatgggcgataacgatctggatggcagcttcacccgcaccttcagcctgcgcgacggcggctactacagctccgtggtggacagccacatgcacttcaagagcgccatccaccccagcatcctgcagaacgggggccccatgttcgccttccgccgcgtggaggaggatcacagcaacaccgagctgggcatcgtggagtaccagcacgccttcaagaccccggatgcagatgccggtgaagaataagagctcgctgatcagcctcgataagatacattgatgagtttggacaaaccacaactagaatgcagtgaaaaaaatgctttatttgtgaaatttgtgatgctattgctttatttgtaaccattataagctgcaataaacaagttttaattaaggtcgggcaggaagagggcctatttcccatgattccttcatatttgcatatacgatacaaggctgttagagagataattagaattaatttgactgtaaacacaaagatattagtacaaaatacgtgacgtagaaagtaataatttcttgggtagtttgcagttttaaaattatgttttaaaatggactatcatatgcttaccgtaacttgaaagtatttcgatttcttggctttatatatcttgtggaaaggacgaaacaccgggtggatgaaatcagcatgatcgaaatcatgctgatttcatccaccttttttaagcttttttgaattcagctgacgtgcctcggaccgctaggaacccctagtgatggagttggccactccctctctgcgcgctcgctcgctcactgaggccgggcgaccaaaggtcgcccgacgcccgggctttgcccgggcggcctcagtgagcgagcgagcgcgcag

SEQ ID NO: 267 - DNA, 4048 bp, synthetic construct
  misc_feature 1..4048: note = Description of Artificial Sequence: Syntheticpolynucleotide
  source 1..4048: mol_type = other DNA
ctgcgcgctcgctcgctcactgaggccgcccgggcgtcgggcgacctttggtcgcccggcctcagtgagcgagcgagcgcgcagagagggagtggccaactccatcactaggggttcctgcggccgcacgcgtctagatcccatatatggagttccgcgttacataacttacggtaaatggcccgcctggctgaccgcccaacgacccccgcccattgacgtcaataatgacgtatgttcccatagtaacgccaatagggactttccattgacgtcaatgggtggagtatttacggtaaactgcccacttggcagtacatcaagtgtatcatatgccaagtacgccccctattgacgtcaatgacggtaaatggcccgcctggcattatgcccagtacatgaccttatgggactttcctacttggcagtacatctacgtattagtcatcgctattaccatggtgatgcggttttggcagtacatcaatgggcgtggatagcggtttgactcacggggatttccaagtctccaccccattgacgtcaatgggagtttgttttggcaccaaaatcaacgggactttccaaaatgtcgtaacaactccgccccattgacgcaaatgggcggtaggcgtgtacggtgggaggtctatataagcagagctcgtttagtgaaccgtcagatcgcctggagacgcaccggtgccaccatggctgaagcccctcctagaaggcttggactgggacctcctcctggggatgctcctagagctgaactggtggctctgacagccgtgcagtctgaacaaggcgaagctggtggcggcggatctccacgtagacttggactgctgggaagccctcttcctcctggtgctccacttcctggacctggcagtggatctggatctgcctgtggccagagaagctctgccgctcacaagagataccggcggctgcagaactgggtgtacaacgtgctggaaagacccagaggctgggccttcgtgtaccacgtgttcatctttctgctggtgttcagctgcctggtgctgtccgtgctgagcaccatccaagaacatcaagagctggctaacgagtgcctgttaatactggagtttgtgatgattgtggtgttcggcctcgagtacatcgtccgcgtttggagcgccggctgctgctgcagatatagaggttggcaaggcagattccgcttcgccagaaagcccttctgcgtgatcgacttcatcgtgttcgtggccagcgtggccgtgattgctgctggcacacagggcaacatcttcgccacaagcgccctgcggagcatgcggtttctgcagatcctgagaatggtccgaatggacagaagaggcggcacctggaagctgctgggctctgtggtgtacgcccacagcaaagagctgatcaccgcctggtacatcggatttctggtgctgatcttcgcctccttcctggtgtacctggccgagaaggacgccaacagcgactttagcagctacgccgactctctttggtggggcaccatcacactgaccaccatcggctacggcgacaagacccctcacacatggctgggaagagtgctggccgctggatttgctctgctgggcatcagctttttcgccctgcctgccggaatcctcggatctggctttgccctgaaggtgcaagagcagcaccggcagaagcacttcgagaagagaagaatgcctgccgccaacctgattcaggccgcttggagactgtacagcaccgacatgagcagagcctacctgaccgccacgtggtattattacgactcgatcctgcctagcttccgcgaactggccctgctgtttgagcatgtgcagagagccagaaacggcggcctcagacctctggaagttcggagagcacctgtgcctgatggcgccccttctagatatcctccagtggccacctgtcacagacccggcagcacatctttttgccctggcgagtctagccggatgggcatcaaggacagaatcagaatgggcagcagccagcggagaacaggcccttctaaacagcatctggcccctccaaccatgcctacaagccctagctctgagcaagtgggcgaagccacctctcctaccaaggtgcagaagtcctggtccttcaacgaccggaccagattcagagccagcctgagactgaagcccagaacctctgccgaggatgccccttctgaagaggtggccgaagagaagtcctaccagtgcgagctgaccgtggacgacatcatgccagccgtgaaaaccgtgatacggtctatccggatcctgaagttcctggtggccaagcggaagttcaaagagacactgcggccctacgacgtgaaggacgtgatcgagcagtattctgccggccacctggacatgctgggcagaatcaagagcctgcagaccagagtggaccagatcgttggaagaggcccaggcgacagaaaggccagagagaagggcgataagggcccatctgatgccgaggttgtcgacgagatatcaatgatgggcagagtggtcaaggtggaaaaacaggtgcagagcatcgagcacaagctggacctgctgctgggattctacagccggtgtctgagaagcggcacatctgcatctctgggcgctgtgcaggtcccactgttcgaccctgatatcaccagcgactatcacagccccgtggaccacgaggacatctccgtttctgctcagaccctgagcatcagcagatccgtgtccaccaacatggacggatcccgggctgactacaaagaccatgacggtgattataaagatcatgacatcgactacaaggatgacgatgacaagggctccggagagggcagaggaagtctgctaacatgcggtgacgtcgaggagaatcctggcccaatggtgagcaagggcgaggcagtgatcaaggagttcatgcggttcaaggtgcacatggagggctccatgaacggccacgagttcgagatcgagggcgagggcgagggccgcccctacgagggcacccagaccgccaagctgaaggtgaccaagggtggccccctgcccttctcctgggacatcctgtcccctcagttcatgtacggctccagggccttcatcaagcaccccgccgacatccccgactactataagcagtccttccccgagggcttcaagtgggagcgcgtgatgaacttcgaggacggcggcgccgtgaccgtgacccaggacacctccctggaggacggcaccctgatctacaaggtgaagctccgcggcaccaacttccctcctgacggccccgtaatgcagaagaagacaatgggctgggaagcgtccaccgagcggttgtaccccgaggacggcgtgctgaagggcgacattaagatggccctgcgcctgaaggacggcggccgctacctggcggacttcaagaccacctacaaggccaagaagcccgtgcagatgcccggcgcctacaacgtcgaccgcaagttggacatcacctcccacaacgaggactacaccgtggtggaacagtacgaacgctccgagggccgccactccaccggcggcatggacgagctgtacaagtaataagagctcgctgatcagcctcgactgtgccttctagttgccagccatctgttgtttgcccctcccccgtgccttccttgaccctggaaggtgccactcccactgtcctttcctaataaaatgaggaaattgcatcgcattgtctgagtaggtgtcattctattctggggggtggggtggggcaggacagcaagggggaggattgggaagacaatagcaggcatgctggggatgcggtgggctctatggaagcttgaattcagctgacgtgcctcggaccgctaggaacccctagtgatggagttggccactccctctctgcgcgctcgctcgctcactgaggccgggcgaccaaaggtcgcccgacgcccgggctttgcccgggcggcctcagtgagcgagcgagcgcgcag

SEQ ID NO: 268 - DNA, 4048 bp, synthetic construct
  misc_feature 1..4048: note = Description of Artificial Sequence: Syntheticpolynucleotide
  source 1..4048: mol_type = other DNA
ctgcgcgctcgctcgctcactgaggccgcccgggcgtcgggcgacctttggtcgcccggcctcagtgagcgagcgagcgcgcagagagggagtggccaactccatcactaggggttcctgcggccgcacgcgtctagatcccatatatggagttccgcgttacataacttacggtaaatggcccgcctggctgaccgcccaacgacccccgcccattgacgtcaataatgacgtatgttcccatagtaacgccaatagggactttccattgacgtcaatgggtggagtatttacggtaaactgcccacttggcagtacatcaagtgtatcatatgccaagtacgccccctattgacgtcaatgacggtaaatggcccgcctggcattatgcccagtacatgaccttatgggactttcctacttggcagtacatctacgtattagtcatcgctattaccatggtgatgcggttttggcagtacatcaatgggcgtggatagcggtttgactcacggggatttccaagtctccaccccattgacgtcaatgggagtttgttttggcaccaaaatcaacgggactttccaaaatgtcgtaacaactccgccccattgacgcaaatgggcggtaggcgtgtacggtgggaggtctatataagcagagctcgtttagtgaaccgtcagatcgcctggagacgcaccggtgccaccatggctgaagcccctcctagaaggcttggactgggacctcctcctggggatgctcctagagctgaactggtggctctgacagccgtgcagtctgaacaaggcgaagctggtggcggcggatctccacgtagacttggactgctgggaagccctcttcctcctggtgctccacttcctggacctggcagtggatctggatctgcctgtggccagagaagctctgccgctcacaagagataccggcggctgcagaactgggtgtacaacgtgctggaaagacccagaggctgggccttcgtgtaccacgtgttcatctttctgctggtgttcagctgcctggtgctgtccgtgctgagcaccatccaagaacatcaagagctggctaacgagtgcctgttaatactggagtttgtgatgattgtggtgttcggcctcgagtacatcgtccgcgtttggagcgccggctgctgctgcagatatagaggttggcaaggcagattccgcttcgccagaaagcccttctgcgtgatcgacttcatcgtgttcgtggccagcgtggccgtgattgctgctggcacacagggcaacatcttcgccacaagcgccctgcggagcatgcggtttctgcagatcctgagaatggtccgaatggacagaagaggcggcacctggaagctgctgggctctgtggtgtacgcccacagcaaagagctgatcaccgcctggtacatcggatttctggtgctgatcttcgcctccttcctggtgtacctggccgagaaggacgccaacagcgactttagcagctacgccgactctctttggtggggcaccatcacactgaccaccatcggctacggcgacaagacccctcacacatggctgggaagagtgctggccgctggatttgctctgctgggcatcagctttttcgccctgcctgccggaatcctcggatctggctttgccctgaaggtgcaagagcagcatagacaaaagcattttgaaaagagaagaatgcctgccgccaacctgattcaggccgcttggagactgtacagcaccgacatgagcagagcctacctgaccgccacgtggtattattacgattcgatcctgcctagcttccgcgaactggccctgctgtttgagcatgtgcagagagccagaaacggcggcctcagacctctggaagttcggagagcacctgtgcctgatggcgccccttctagatatcctccagtggccacctgtcacagacccggcagcacatctttttgccctggcgagtctagccggatgggcatcaaggacagaatcagaatgggcagcagccagcggagaacaggcccttctaaacagcatctggcccctccaaccatgcctacaagccctagctctgagcaagtgggcgaagccacctctcctaccaaggtgcagaagtcctggtccttcaacgaccggaccagatttagagccagcctccggctgaagcccagaacctctgccgaggatgccccttctgaagaggtggccgaagagaagtcctaccagtgcgagctgaccgtggacgacatcatgccagccgtgaaaaccgtgataaggtctatacgcatcctgaagttcctggtggccaagcggaagttcaaagagacactgcggccctacgacgtgaaggacgtgatcgagcagtattctgccggccacctggacatgctgggcagaatcaagagcctgcagaccagagtggaccagatcgttggaagaggcccaggcgacagaaaggccagagagaagggcgataagggcccatctgatgccgaggttgtcgacgagatatcaatgatgggcagagtcgtgaaagtcgaaaaacaggtgcagagcatcgagcacaagctggacctgctgctgggattctacagccggtgtctgagaagcggcacatctgcatctctgggcgctgtgcaggtcccactgttcgatcctgatattacgagcgattatcacagccccgtggaccacgaggacatctccgtttctgctcagaccctgagcatcagcagatccgtgtccaccaacatggacggatcccgggctgactacaaagaccatgacggtgattataaagatcatgacatcgactacaaggatgacgatgacaagggctccggagagggcagaggaagtctgctaacatgcggtgacgtcgaggagaatcctggcccaatggtgagcaagggcgaggcagtgatcaaggagttcatgcggttcaaggtgcacatggagggctccatgaacggccacgagttcgagatcgagggcgagggcgagggccgcccctacgagggcacccagaccgccaagctgaaggtgaccaagggtggccccctgcccttctcctgggacatcctgtcccctcagttcatgtacggctccagggccttcatcaagcaccccgccgacatccccgactactataagcagtccttccccgagggcttcaagtgggagcgcgtgatgaacttcgaggacggcggcgccgtgaccgtgacccaggacacctccctggaggacggcaccctgatctacaaggtgaagctccgcggcaccaacttccctcctgacggccccgtaatgcagaagaagacaatgggctgggaagcgtccaccgagcggttgtaccccgaggacggcgtgctgaagggcgacattaagatggccctgcgcctgaaggacggcggccgctacctggcggacttcaagaccacctacaaggccaagaagcccgtgcagatgcccggcgcctacaacgtcgaccgcaagttggacatcacctcccacaacgaggactacaccgtggtggaacagtacgaacgctccgagggccgccactccaccggcggcatggacgagctgtacaagtaataagagctcgctgatcagcctcgactgtgccttctagttgccagccatctgttgtttgcccctcccccgtgccttccttgaccctggaaggtgccactcccactgtcctttcctaataaaatgaggaaattgcatcgcattgtctgagtaggtgtcattctattctggggggtggggtggggcaggacagcaagggggaggattgggaagacaatagcaggcatgctggggatgcggtgggctctatggaagcttgaattcagctgacgtgcctcggaccgctaggaacccctagtgatggagttggccactccctctctgcgcgctcgctcgctcactgaggccgggcgaccaaaggtcgcccgacgcccgggctttgcccgggcggcctcagtgagcgagcgagcgcgcag

SEQ ID NO: 269 - DNA, 3625 bp, synthetic construct
  misc_feature 1..3625: note = Description of Artificial Sequence: Syntheticpolynucleotide
  source 1..3625: mol_type = other DNA
ctgcgcgctcgctcgctcactgaggccgcccgggcgtcgggcgacctttggtcgcccggcctcagtgagcgagcgagcgcgcagagagggagtggccaactccatcactaggggttcctgcggccgcacgcgtctagatcccatatatggagttccgcgttacataacttacggtaaatggcccgcctggctgaccgcccaacgacccccgcccattgacgtcaataatgacgtatgttcccatagtaacgccaatagggactttccattgacgtcaatgggtggagtatttacggtaaactgcccacttggcagtacatcaagtgtatcatatgccaagtacgccccctattgacgtcaatgacggtaaatggcccgcctggcattatgcccagtacatgaccttatgggactttcctacttggcagtacatctacgtattagtcatcgctattaccatggtgatgcggttttggcagtacatcaatgggcgtggatagcggtttgactcacggggatttccaagtctccaccccattgacgtcaatgggagtttgttttggcaccaaaatcaacgggactttccaaaatgtcgtaacaactccgccccattgacgcaaatgggcggtaggcgtgtacggtgggaggtctatataagcagagctcgtttagtgaaccgtcgtttagtgaaccgtcagatcgcctggagacgcaccggtgccaccatggctgaagcccctcctagaaggcttggactgggacctcctcctggggatgctcctagagctgaactggtggctctgacagccgtgcagtctgaacaaggcgaagctggtggcggcggatctccacgtagacttggactgctgggaagccctcttcctcctggtgctccacttcctggacctggcagtggatctggatctgcctgtggccagagaagctctgccgctcacaagagataccggcggctgcagaactgggtgtacaacgtgctggaaagacccagaggctgggccttcgtgtaccacgtgttcatctttctgctggtgttcagctgcctggtgctgtccgtgctgagcaccatccaagaacatcaagagctggctaacgagtgcctgttaatactggagtttgtgatgattgtggtgttcggcctcgagtacatcgtccgcgtttggagcgccggctgctgctgcagatatagaggttggcaaggcagattccgcttcgccagaaagcccttctgcgtgatcgacttcatcgtgttcgtggccagcgtggccgtgattgctgctggcacacagggcaacatcttcgccacaagcgccctgcggagcatgcggtttctgcagatcctgagaatggtccgaatggacagaagaggcggcacctggaagctgctgggctctgtggtgtacgcccacagcaaagagctgatcaccgcctggtacatcggatttctggtgctgatcttcgcctccttcctggtgtacctggccgagaaggacgccaacagcgactttagcagctacgccgactctctttggtggggcaccatcacactgaccaccatcggctacggcgacaagacccctcacacatggctgggaagagtgctggccgctggatttgctctgctgggcatcagctttttcgccctgcctgccggaatcctcggatctggctttgccctgaaggtgcaagagcagcaccggcagaagcacttcgagaagagaagaatgcctgccgccaacctgattcaggccgcttggagactgtacagcaccgacatgagcagagcctacctgaccgccacgtggtattattacgactcgatcctgcctagcttccgcgaactggccctgctgtttgagcatgtgcagagagccagaaacggcggcctcagacctctggaagttcggagagcacctgtgcctgatggcgccccttctagatatcctccagtggccacctgtcacagacccggcagcacatctttttgccctggcgagtctagccggatgggcatcaaggacagaatcagaatgggcagcagccagcggagaacaggcccttctaaacagcatctggcccctccaaccatgcctacaagccctagctctgagcaagtgggcgaagccacctctcctaccaaggtgcagaagtcctggtccttcaacgaccggaccagattcagagccagcctgagactgaagcccagaacctctgccgaggatgccccttctgaagaggtggccgaagagaagtcctaccagtgcgagctgaccgtggacgacatcatgccagccgtgaaaaccgtgatacggtctatccggatcctgaagttcctggtggccaagcggaagttcaaagagacactgcggccctacgacgtgaaggacgtgatcgagcagtattctgccggccacctggacatgctgggcagaatcaagagcctgcagaccagagtggaccagatcgttggaagaggcccaggcgacagaaaggccagagagaagggcgataagggcccatctgatgccgaggttgtcgacgagatatcaatgatgggcagagtggtcaaggtggaaaaacaggtgcagagcatcgagcacaagctggacctgctgctgggattctacagccggtgtctgagaagcggcacatctgcatctctgggcgctgtgcaggtcccactgttcgaccctgatatcaccagcgactatcacagccccgtggaccacgaggacatctccgtttctgctcagaccctgagcatcagcagatccgtgtccaccaacatggactaataagagctcgctgatcagcctcgactgtgccttctagttgccagccatctgttgtttgcccctcccccgtgccttccttgaccctggaaggtgccactcccactgtcctttcctaataaaatgaggaaattgcatcgcattgtctgagtaggtgtcattctattctggggggtggggtggggcaggacagcaagggggaggattgggaagacaatagcaggcatgctggggatgcggtgggctctatggttaattaaggtcgggcaggaagagggcctatttcccatgattccttcatatttgcatatacgatacaaggctgttagagagataattagaattaatttgactgtaaacacaaagatattagtacaaaatacgtgacgtagaaagtaataatttcttgggtagtttgcagttttaaaattatgttttaaaatggactatcatatgcttaccgtaacttgaaagtatttcgatttcttggctttatatatcttgtggaaaggacgaaacaccgaggagcaccaggaacttgccagtttaagtactctgtgctggaaacagcacagaatctacttaaacaaggcaaaatgccgtgtttatctcgtcaacttgttggcgagattttttctaaagcttgaattcaagcttgaattcagctgacgtgcctcggaccgctaggaacccctagtgatggagttggccactccctctctgcgcgctcgctcgctcactgaggccgggcgaccaaaggtcgcccgacgcccgggctttgcccgggcggcctcagtgagcgagcgagcgcgcag

SEQ ID NO: 270 - DNA, 3625 bp, synthetic construct
  misc_feature 1..3625: note = Description of Artificial Sequence: Syntheticpolynucleotide
  source 1..3625: mol_type = other DNA
ctgcgcgctcgctcgctcactgaggccgcccgggcgtcgggcgacctttggtcgcccggcctcagtgagcgagcgagcgcgcagagagggagtggccaactccatcactaggggttcctgcggccgcacgcgtctagatcccatatatggagttccgcgttacataacttacggtaaatggcccgcctggctgaccgcccaacgacccccgcccattgacgtcaataatgacgtatgttcccatagtaacgccaatagggactttccattgacgtcaatgggtggagtatttacggtaaactgcccacttggcagtacatcaagtgtatcatatgccaagtacgccccctattgacgtcaatgacggtaaatggcccgcctggcattatgcccagtacatgaccttatgggactttcctacttggcagtacatctacgtattagtcatcgctattaccatggtgatgcggttttggcagtacatcaatgggcgtggatagcggtttgactcacggggatttccaagtctccaccccattgacgtcaatgggagtttgttttggcaccaaaatcaacgggactttccaaaatgtcgtaacaactccgccccattgacgcaaatgggcggtaggcgtgtacggtgggaggtctatataagcagagctcgtttagtgaaccgtcgtttagtgaaccgtcagatcgcctggagacgcaccggtgccaccatggctgaagcccctcctagaaggcttggactgggacctcctcctggggatgctcctagagctgaactggtggctctgacagccgtgcagtctgaacaaggcgaagctggtggcggcggatctccacgtagacttggactgctgggaagccctcttcctcctggtgctccacttcctggacctggcagtggatctggatctgcctgtggccagagaagctctgccgctcacaagagataccggcggctgcagaactgggtgtacaacgtgctggaaagacccagaggctgggccttcgtgtaccacgtgttcatctttctgctggtgttcagctgcctggtgctgtccgtgctgagcaccatccaagaacatcaagagctggctaacgagtgcctgttaatactggagtttgtgatgattgtggtgttcggcctcgagtacatcgtccgcgtttggagcgccggctgctgctgcagatatagaggttggcaaggcagattccgcttcgccagaaagcccttctgcgtgatcgacttcatcgtgttcgtggccagcgtggccgtgattgctgctggcacacagggcaacatcttcgccacaagcgccctgcggagcatgcggtttctgcagatcctgagaatggtccgaatggacagaagaggcggcacctggaagctgctgggctctgtggtgtacgcccacagcaaagagctgatcaccgcctggtacatcggatttctggtgctgatcttcgcctccttcctggtgtacctggccgagaaggacgccaacagcgactttagcagctacgccgactctctttggtggggcaccatcacactgaccaccatcggctacggcgacaagacccctcacacatggctgggaagagtgctggccgctggatttgctctgctgggcatcagctttttcgccctgcctgccggaatcctcggatctggctttgccctgaaggtgcaagagcagcaccggcagaagcacttcgagaagagaagaatgcctgccgccaacctgattcaggccgcttggagactgtacagcaccgacatgagcagagcctacctgaccgccacgtggtattattacgactcgatcctgcctagcttccgcgaactggccctgctgtttgagcatgtgcagagagccagaaacggcggcctcagacctctggaagttcggagagcacctgtgcctgatggcgccccttctagatatcctccagtggccacctgtcacagacccggcagcacatctttttgccctggcgagtctagccggatgggcatcaaggacagaatcagaatgggcagcagccagcggagaacaggcccttctaaacagcatctggcccctccaaccatgcctacaagccctagctctgagcaagtgggcgaagccacctctcctaccaaggtgcagaagtcctggtccttcaacgaccggaccagattcagagccagcctgagactgaagcccagaacctctgccgaggatgccccttctgaagaggtggccgaagagaagtcctaccagtgcgagctgaccgtggacgacatcatgccagccgtgaaaaccgtgatacggtctatccggatcctgaagttcctggtggccaagcggaagttcaaagagacactgcggccctacgacgtgaaggacgtgatcgagcagtattctgccggccacctggacatgctgggcagaatcaagagcctgcagaccagagtggaccagatcgttggaagaggcccaggcgacagaaaggccagagagaagggcgataagggcccatctgatgccgaggttgtcgacgagatatcaatgatgggcagagtggtcaaggtggaaaaacaggtgcagagcatcgagcacaagctggacctgctgctgggattctacagccggtgtctgagaagcggcacatctgcatctctgggcgctgtgcaggtcccactgttcgaccctgatatcaccagcgactatcacagccccgtggaccacgaggacatctccgtttctgctcagaccctgagcatcagcagatccgtgtccaccaacatggactaataagagctcgctgatcagcctcgactgtgccttctagttgccagccatctgttgtttgcccctcccccgtgccttccttgaccctggaaggtgccactcccactgtcctttcctaataaaatgaggaaattgcatcgcattgtctgagtaggtgtcattctattctggggggtggggtggggcaggacagcaagggggaggattgggaagacaatagcaggcatgctggggatgcggtgggctctatggttaattaaggtcgggcaggaagagggcctatttcccatgattccttcatatttgcatatacgatacaaggctgttagagagataattagaattaatttgactgtaaacacaaagatattagtacaaaatacgtgacgtagaaagtaataatttcttgggtagtttgcagttttaaaattatgttttaaaatggactatcatatgcttaccgtaacttgaaagtatttcgatttcttggctttatatatcttgtggaaaggacgaaacaccgaagccgaaaaccacgatcatcgtttaagtactctgtgctggaaacagcacagaatctacttaaacaaggcaaaatgccgtgtttatctcgtcaacttgttggcgagattttttctaaagcttgaattcaagcttgaattcagctgacgtgcctcggaccgctaggaacccctagtgatggagttggccactccctctctgcgcgctcgctcgctcactgaggccgggcgaccaaaggtcgcccgacgcccgggctttgcccgggcggcctcagtgagcgagcgagcgcgcag

SEQ ID NO: 271 - DNA, 3625 bp, synthetic construct
  misc_feature 1..3625: note = Description of Artificial Sequence: Syntheticpolynucleotide
  source 1..3625: mol_type = other DNA
ctgcgcgctcgctcgctcactgaggccgcccgggcgtcgggcgacctttggtcgcccggcctcagtgagcgagcgagcgcgcagagagggagtggccaactccatcactaggggttcctgcggccgcacgcgtctagatcccatatatggagttccgcgttacataacttacggtaaatggcccgcctggctgaccgcccaacgacccccgcccattgacgtcaataatgacgtatgttcccatagtaacgccaatagggactttccattgacgtcaatgggtggagtatttacggtaaactgcccacttggcagtacatcaagtgtatcatatgccaagtacgccccctattgacgtcaatgacggtaaatggcccgcctggcattatgcccagtacatgaccttatgggactttcctacttggcagtacatctacgtattagtcatcgctattaccatggtgatgcggttttggcagtacatcaatgggcgtggatagcggtttgactcacggggatttccaagtctccaccccattgacgtcaatgggagtttgttttggcaccaaaatcaacgggactttccaaaatgtcgtaacaactccgccccattgacgcaaatgggcggtaggcgtgtacggtgggaggtctatataagcagagctcgtttagtgaaccgtcgtttagtgaaccgtcagatcgcctggagacgcaccggtgccaccatggctgaagcccctcctagaaggcttggactgggacctcctcctggggatgctcctagagctgaactggtggctctgacagccgtgcagtctgaacaaggcgaagctggtggcggcggatctccacgtagacttggactgctgggaagccctcttcctcctggtgctccacttcctggacctggcagtggatctggatctgcctgtggccagagaagctctgccgctcacaagagataccggcggctgcagaactgggtgtacaacgtgctggaaagacccagaggctgggccttcgtgtaccacgtgttcatctttctgctggtgttcagctgcctggtgctgtccgtgctgagcaccatccaagaacatcaagagctggctaacgagtgcctgttaatactggagtttgtgatgattgtggtgttcggcctcgagtacatcgtccgcgtttggagcgccggctgctgctgcagatatagaggttggcaaggcagattccgcttcgccagaaagcccttctgcgtgatcgacttcatcgtgttcgtggccagcgtggccgtgattgctgctggcacacagggcaacatcttcgccacaagcgccctgcggagcatgcggtttctgcagatcctgagaatggtccgaatggacagaagaggcggcacctggaagctgctgggctctgtggtgtacgcccacagcaaagagctgatcaccgcctggtacatcggatttctggtgctgatcttcgcctccttcctggtgtacctggccgagaaggacgccaacagcgactttagcagctacgccgactctctttggtggggcaccatcacactgaccaccatcggctacggcgacaagacccctcacacatggctgggaagagtgctggccgctggatttgctctgctgggcatcagctttttcgccctgcctgccggaatcctcggatctggctttgccctgaaggtgcaagagcagcaccggcagaagcacttcgagaagagaagaatgcctgccgccaacctgattcaggccgcttggagactgtacagcaccgacatgagcagagcctacctgaccgccacgtggtattattacgactcgatcctgcctagcttccgcgaactggccctgctgtttgagcatgtgcagagagccagaaacggcggcctcagacctctggaagttcggagagcacctgtgcctgatggcgccccttctagatatcctccagtggccacctgtcacagacccggcagcacatctttttgccctggcgagtctagccggatgggcatcaaggacagaatcagaatgggcagcagccagcggagaacaggcccttctaaacagcatctggcccctccaaccatgcctacaagccctagctctgagcaagtgggcgaagccacctctcctaccaaggtgcagaagtcctggtccttcaacgaccggaccagattcagagccagcctgagactgaagcccagaacctctgccgaggatgccccttctgaagaggtggccgaagagaagtcctaccagtgcgagctgaccgtggacgacatcatgccagccgtgaaaaccgtgatacggtctatccggatcctgaagttcctggtggccaagcggaagttcaaagagacactgcggccctacgacgtgaaggacgtgatcgagcagtattctgccggccacctggacatgctgggcagaatcaagagcctgcagaccagagtggaccagatcgttggaagaggcccaggcgacagaaaggccagagagaagggcgataagggcccatctgatgccgaggttgtcgacgagatatcaatgatgggcagagtggtcaaggtggaaaaacaggtgcagagcatcgagcacaagctggacctgctgctgggattctacagccggtgtctgagaagcggcacatctgcatctctgggcgctgtgcaggtcccactgttcgaccctgatatcaccagcgactatcacagccccgtggaccacgaggacatctccgtttctgctcagaccctgagcatcagcagatccgtgtccaccaacatggactaataagagctcgctgatcagcctcgactgtgccttctagttgccagccatctgttgtttgcccctcccccgtgccttccttgaccctggaaggtgccactcccactgtcctttcctaataaaatgaggaaattgcatcgcattgtctgagtaggtgtcattctattctggggggtggggtggggcaggacagcaagggggaggattgggaagacaatagcaggcatgctggggatgcggtgggctctatggttaattaaggtcgggcaggaagagggcctatttcccatgattccttcatatttgcatatacgatacaaggctgttagagagataattagaattaatttgactgtaaacacaaagatattagtacaaaatacgtgacgtagaaagtaataatttcttgggtagtttgcagttttaaaattatgttttaaaatggactatcatatgcttaccgtaacttgaaagtatttcgatttcttggctttatatatcttgtggaaaggacgaaacaccgaagccaaagaccacaatcatcgtttaagtactctgtgctggaaacagcacagaatctacttaaacaaggcaaaatgccgtgtttatctcgtcaacttgttggcgagattttttctaaagcttgaattcaagcttgaattcagctgacgtgcctcggaccgctaggaacccctagtgatggagttggccactccctctctgcgcgctcgctcgctcactgaggccgggcgaccaaaggtcgcccgacgcccgggctttgcccgggcggcctcagtgagcgagcgagcgcgcag

SEQ ID NO: 272 - DNA, 5994 bp, synthetic construct
  misc_feature 1..5994: note = Description of Artificial Sequence: Syntheticpolynucleotide
  source 1..5994: mol_type = other DNA
cctgcaggcagctgcgcgctcgctcgctcactgaggccgcccgggcgtcgggcgacctttggtcgcccggcctcagtgagcgagcgagcgcgcagagagggagtggccaactccatcactaggggttcctgcggccgcacgcgtctagatcccatatatggagttccgcgttacataacttacggtaaatggcccgcctggctgaccgcccaacgacccccgcccattgacgtcaataatgacgtatgttcccatagtaacgccaatagggactttccattgacgtcaatgggtggagtatttacggtaaactgcccacttggcagtacatcaagtgtatcatatgccaagtacgccccctattgacgtcaatgacggtaaatggcccgcctggcattatgcccagtacatgaccttatgggactttcctacttggcagtacatctacgtattagtcatcgctattaccatggtgatgcggttttggcagtacatcaatgggcgtggatagcggtttgactcacggggatttccaagtctccaccccattgacgtcaatgggagtttgttttggcaccaaaatcaacgggactttccaaaatgtcgtaacaactccgccccattgacgcaaatgggcggtaggcgtgtacggtgggaggtctatataagcagagctcgtttagtgaaccgtcgtttagtgaaccgtcagatcgcctggagacgcaccggtgccaccatggctgaagcccctcctagaaggcttggactgggacctcctcctggggatgctcctagagctgaactggtggctctgacagccgtgcagtctgaacaaggcgaagctggtggcggcggatctccacgtagacttggactgctgggaagccctcttcctcctggtgctccacttcctggacctggcagtggatctggatctgcctgtggccagagaagctctgccgctcacaagagataccggcggctgcagaactgggtgtacaacgtgctggaaagacccagaggctgggccttcgtgtaccacgtgttcatctttctgctggtgttcagctgcctggtgctgtccgtgctgagcaccatccaagaacatcaagagctggctaacgagtgcctgttaatactggagtttgtgatgattgtggtgttcggcctcgagtacatcgtccgcgtttggagcgccggctgctgctgcagatatagaggttggcaaggcagattccgcttcgccagaaagcccttctgcgtgatcgacttcatcgtgttcgtggccagcgtggccgtgattgctgctggcacacagggcaacatcttcgccacaagcgccctgcggagcatgcggtttctgcagatcctgagaatggtccgaatggacagaagaggcggcacctggaagctgctgggctctgtggtgtacgcccacagcaaagagctgatcaccgcctggtacatcggatttctggtgctgatcttcgcctccttcctggtgtacctggccgagaaggacgccaacagcgactttagcagctacgccgactctctttggtggggcaccatcacactgaccaccatcggctacggcgacaagacccctcacacatggctgggaagagtgctggccgctggatttgctctgctgggcatcagctttttcgccctgcctgccggaatcctcggatctggctttgccctgaaggtgcaagagcagcaccggcagaagcacttcgagaagagaagaatgcctgccgccaacctgattcaggccgcttggagactgtacagcaccgacatgagcagagcctacctgaccgccacgtggtattattacgactcgatcctgcctagcttccgcgaactggccctgctgtttgagcatgtgcagagagccagaaacggcggcctcagacctctggaagttcggagagcacctgtgcctgatggcgccccttctagatatcctccagtggccacctgtcacagacccggcagcacatctttttgccctggcgagtctagccggatgggcatcaaggacagaatcagaatgggcagcagccagcggagaacaggcccttctaaacagcatctggcccctccaaccatgcctacaagccctagctctgagcaagtgggcgaagccacctctcctaccaaggtgcagaagtcctggtccttcaacgaccggaccagattcagagccagcctgagactgaagcccagaacctctgccgaggatgccccttctgaagaggtggccgaagagaagtcctaccagtgcgagctgaccgtggacgacatcatgccagccgtgaaaaccgtgatacggtctatccggatcctgaagttcctggtggccaagcggaagttcaaagagacactgcggccctacgacgtgaaggacgtgatcgagcagtattctgccggccacctggacatgctgggcagaatcaagagcctgcagaccagagtggaccagatcgttggaagaggcccaggcgacagaaaggccagagagaagggcgataagggcccatctgatgccgaggttgtcgacgagatatcaatgatgggcagagtggtcaaggtggaaaaacaggtgcagagcatcgagcacaagctggacctgctgctgggattctacagccggtgtctgagaagcggcacatctgcatctctgggcgctgtgcaggtcccactgttcgaccctgatatcaccagcgactatcacagccccgtggaccacgaggacatctccgtttctgctcagaccctgagcatcagcagatccgtgtccaccaacatggactaataagagctcgctgatcagcctcgactgtgccttctagttgccagccatctgttgtttgcccctcccccgtgccttccttgaccctggaaggtgccactcccactgtcctttcctaataaaatgaggaaattgcatcgcattgtctgagtaggtgtcattctattctggggggtggggtggggcaggacagcaagggggaggattgggaagacaatagcaggcatgctggggatgcggtgggctctatggttaattaaggtcgggcaggaagagggcctatttcccatgattccttcatatttgcatatacgatacaaggctgttagagagataattagaattaatttgactgtaaacacaaagatattagtacaaaatacgtgacgtagaaagtaataatttcttgggtagtttgcagttttaaaattatgttttaaaatggactatcatatgcttaccgtaacttgaaagtatttcgatttcttggctttatatatcttgtggaaaggacgaaacaccgaggagcaccaggaacttgccagtttaagtactctgtgctggaaacagcacagaatctacttaaacaaggcaaaatgccgtgtttatctcgtcaacttgttggcgagattttttctaaagcttgaattcaagcttgaattcagctgacgtgcctcggaccgctaggaacccctagtgatggagttggccactccctctctgcgcgctcgctcgctcactgaggccgggcgaccaaaggtcgcccgacgcccgggctttgcccgggcggcctcagtgagcgagcgagcgcgcagctgcctgcaggggcgcctgatgcggtattttctccttacgcatctgtgcggtatttcacaccgcatacgtcaaagcaaccatagtacgcgccctgtagcggcgcattaagcgcggcgggtgtggtggttacgcgcagcgtgaccgctacacttgccagcgccctagcgcccgctcctttcgctttcttcccttcctttctcgccacgttcgccggctttccccgtcaagctctaaatcgggggctccctttagggttccgatttagtgctttacggcacctcgaccccaaaaaacttgatttgggtgatggttcacgtagtgggccatcgccctgatagacggtttttcgccctttgacgttggagtccacgttctttaatagtggactcttgttccaaactggaacaacactcaaccctatctcgggctattcttttgatttataagggattttgccgatttcggcctattggttaaaaaatgagctgatttaacaaaaatttaacgcgaattttaacaaaatattaacgtttacaattttatggtgcactctcagtacaatctgctctgatgccgcatagttaagccagccccgacacccgccaacacccgctgacgcgccctgacgggcttgtctgctcccggcatccgcttacagacaagctgtgaccgtctccgggagctgcatgtgtcagaggttttcaccgtcatcaccgaaacgcgcgagacgaaagggcctcgtgatacgcctatttttataggttaatgtcatgaacaataaaactgtctgcttacataaacagtaatacaaggggtgttatgagccatattcaacgggaaacgtcgaggccgcgattaaattccaacatggatgctgatttatatgggtataaatgggctcgcgataatgtcgggcaatcaggtgcgacaatctatcgcttgtatgggaagcccgatgcgccagagttgtttctgaaacatggcaaaggtagcgttgccaatgatgttacagatgagatggtcagactaaactggctgacggaatttatgcctcttccgaccatcaagcattttatccgtactcctgatgatgcatggttactcaccactgcgatccccggaaaaacagcattccaggtattagaagaatatcctgattcaggtgaaaatattgttgatgcgctggcagtgttcctgcgccggttgcattcgattcctgtttgtaattgtccttttaacagcgatcgcgtatttcgtctcgctcaggcgcaatcacgaatgaataacggtttggttgatgcgagtgattttgatgacgagcgtaatggctggcctgttgaacaagtctggaaagaaatgcataaacttttgccattctcaccggattcagtcgtcactcatggtgatttctcacttgataaccttatttttgacgaggggaaattaataggttgtattgatgttggacgagtcggaatcgcagaccgataccaggatcttgccatcctatggaactgcctcggtgagttttctccttcattacagaaacggctttttcaaaaatatggtattgataatcctgatatgaataaattgcagtttcatttgatgctcgatgagtttttctaatctcatgaccaaaatcccttaacgtgagttttcgttccactgagcgtcagaccccgtagaaaagatcaaaggatcttcttgagatcctttttttctgcgcgtaatctgctgcttgcaaacaaaaaaaccaccgctaccagcggtggtttgtttgccggatcaagagctaccaactctttttccgaaggtaactggcttcagcagagcgcagataccaaatactgtccttctagtgtagccgtagttaggccaccacttcaagaactctgtagcaccgcctacatacctcgctctgctaatcctgttaccagtggctgctgccagtggcgataagtcgtgtcttaccgggttggactcaagacgatagttaccggataaggcgcagcggtcgggctgaacggggggttcgtgcacacagcccagcttggagcgaacgacctacaccgaactgagatacctacagcgtgagctatgagaaagcgccacgcttcccgaagggagaaaggcggacaggtatccggtaagcggcagggtcggaacaggagagcgcacgagggagcttccagggggaaacgcctggtatctttatagtcctgtcgggtttcgccacctctgacttgagcgtcgatttttgtgatgctcgtcaggggggcggagcctatggaaaaacgccagcaacgcggcctttttacggttcctggccttttgctggccttttgctcacatgt

SEQ ID NO: 273 - DNA, 5994 bp, synthetic construct
  misc_feature 1..5994: note = Description of Artificial Sequence: Syntheticpolynucleotide
  source 1..5994: mol_type = other DNA
cctgcaggcagctgcgcgctcgctcgctcactgaggccgcccgggcgtcgggcgacctttggtcgcccggcctcagtgagcgagcgagcgcgcagagagggagtggccaactccatcactaggggttcctgcggccgcacgcgtctagatcccatatatggagttccgcgttacataacttacggtaaatggcccgcctggctgaccgcccaacgacccccgcccattgacgtcaataatgacgtatgttcccatagtaacgccaatagggactttccattgacgtcaatgggtggagtatttacggtaaactgcccacttggcagtacatcaagtgtatcatatgccaagtacgccccctattgacgtcaatgacggtaaatggcccgcctggcattatgcccagtacatgaccttatgggactttcctacttggcagtacatctacgtattagtcatcgctattaccatggtgatgcggttttggcagtacatcaatgggcgtggatagcggtttgactcacggggatttccaagtctccaccccattgacgtcaatgggagtttgttttggcaccaaaatcaacgggactttccaaaatgtcgtaacaactccgccccattgacgcaaatgggcggtaggcgtgtacggtgggaggtctatataagcagagctcgtttagtgaaccgtcgtttagtgaaccgtcagatcgcctggagacgcaccggtgccaccatggctgaagcccctcctagaaggcttggactgggacctcctcctggggatgctcctagagctgaactggtggctctgacagccgtgcagtctgaacaaggcgaagctggtggcggcggatctccacgtagacttggactgctgggaagccctcttcctcctggtgctccacttcctggacctggcagtggatctggatctgcctgtggccagagaagctctgccgctcacaagagataccggcggctgcagaactgggtgtacaacgtgctggaaagacccagaggctgggccttcgtgtaccacgtgttcatctttctgctggtgttcagctgcctggtgctgtccgtgctgagcaccatccaagaacatcaagagctggctaacgagtgcctgttaatactggagtttgtgatgattgtggtgttcggcctcgagtacatcgtccgcgtttggagcgccggctgctgctgcagatatagaggttggcaaggcagattccgcttcgccagaaagcccttctgcgtgatcgacttcatcgtgttcgtggccagcgtggccgtgattgctgctggcacacagggcaacatcttcgccacaagcgccctgcggagcatgcggtttctgcagatcctgagaatggtccgaatggacagaagaggcggcacctggaagctgctgggctctgtggtgtacgcccacagcaaagagctgatcaccgcctggtacatcggatttctggtgctgatcttcgcctccttcctggtgtacctggccgagaaggacgccaacagcgactttagcagctacgccgactctctttggtggggcaccatcacactgaccaccatcggctacggcgacaagacccctcacacatggctgggaagagtgctggccgctggatttgctctgctgggcatcagctttttcgccctgcctgccggaatcctcggatctggctttgccctgaaggtgcaagagcagcaccggcagaagcacttcgagaagagaagaatgcctgccgccaacctgattcaggccgcttggagactgtacagcaccgacatgagcagagcctacctgaccgccacgtggtattattacgactcgatcctgcctagcttccgcgaactggccctgctgtttgagcatgtgcagagagccagaaacggcggcctcagacctctggaagttcggagagcacctgtgcctgatggcgccccttctagatatcctccagtggccacctgtcacagacccggcagcacatctttttgccctggcgagtctagccggatgggcatcaaggacagaatcagaatgggcagcagccagcggagaacaggcccttctaaacagcatctggcccctccaaccatgcctacaagccctagctctgagcaagtgggcgaagccacctctcctaccaaggtgcagaagtcctggtccttcaacgaccggaccagattcagagccagcctgagactgaagcccagaacctctgccgaggatgccccttctgaagaggtggccgaagagaagtcctaccagtgcgagctgaccgtggacgacatcatgccagccgtgaaaaccgtgatacggtctatccggatcctgaagttcctggtggccaagcggaagttcaaagagacactgcggccctacgacgtgaaggacgtgatcgagcagtattctgccggccacctggacatgctgggcagaatcaagagcctgcagaccagagtggaccagatcgttggaagaggcccaggcgacagaaaggccagagagaagggcgataagggcccatctgatgccgaggttgtcgacgagatatcaatgatgggcagagtggtcaaggtggaaaaacaggtgcagagcatcgagcacaagctggacctgctgctgggattctacagccggtgtctgagaagcggcacatctgcatctctgggcgctgtgcaggtcccactgttcgaccctgatatcaccagcgactatcacagccccgtggaccacgaggacatctccgtttctgctcagaccctgagcatcagcagatccgtgtccaccaacatggactaataagagctcgctgatcagcctcgactgtgccttctagttgccagccatctgttgtttgcccctcccccgtgccttccttgaccctggaaggtgccactcccactgtcctttcctaataaaatgaggaaattgcatcgcattgtctgagtaggtgtcattctattctggggggtggggtggggcaggacagcaagggggaggattgggaagacaatagcaggcatgctggggatgcggtgggctctatggttaattaaggtcgggcaggaagagggcctatttcccatgattccttcatatttgcatatacgatacaaggctgttagagagataattagaattaatttgactgtaaacacaaagatattagtacaaaatacgtgacgtagaaagtaataatttcttgggtagtttgcagttttaaaattatgttttaaaatggactatcatatgcttaccgtaacttgaaagtatttcgatttcttggctttatatatcttgtggaaaggacgaaacaccgaagccgaaaaccacgatcatcgtttaagtactctgtgctggaaacagcacagaatctacttaaacaaggcaaaatgccgtgtttatctcgtcaacttgttggcgagattttttctaaagcttgaattcaagcttgaattcagctgacgtgcctcggaccgctaggaacccctagtgatggagttggccactccctctctgcgcgctcgctcgctcactgaggccgggcgaccaaaggtcgcccgacgcccgggctttgcccgggcggcctcagtgagcgagcgagcgcgcagctgcctgcaggggcgcctgatgcggtattttctccttacgcatctgtgcggtatttcacaccgcatacgtcaaagcaaccatagtacgcgccctgtagcggcgcattaagcgcggcgggtgtggtggttacgcgcagcgtgaccgctacacttgccagcgccctagcgcccgctcctttcgctttcttcccttcctttctcgccacgttcgccggctttccccgtcaagctctaaatcgggggctccctttagggttccgatttagtgctttacggcacctcgaccccaaaaaacttgatttgggtgatggttcacgtagtgggccatcgccctgatagacggtttttcgccctttgacgttggagtccacgttctttaatagtggactcttgttccaaactggaacaacactcaaccctatctcgggctattcttttgatttataagggattttgccgatttcggcctattggttaaaaaatgagctgatttaacaaaaatttaacgcgaattttaacaaaatattaacgtttacaattttatggtgcactctcagtacaatctgctctgatgccgcatagttaagccagccccgacacccgccaacacccgctgacgcgccctgacgggcttgtctgctcccggcatccgcttacagacaagctgtgaccgtctccgggagctgcatgtgtcagaggttttcaccgtcatcaccgaaacgcgcgagacgaaagggcctcgtgatacgcctatttttataggttaatgtcatgaacaataaaactgtctgcttacataaacagtaatacaaggggtgttatgagccatattcaacgggaaacgtcgaggccgcgattaaattccaacatggatgctgatttatatgggtataaatgggctcgcgataatgtcgggcaatcaggtgcgacaatctatcgcttgtatgggaagcccgatgcgccagagttgtttctgaaacatggcaaaggtagcgttgccaatgatgttacagatgagatggtcagactaaactggctgacggaatttatgcctcttccgaccatcaagcattttatccgtactcctgatgatgcatggttactcaccactgcgatccccggaaaaacagcattccaggtattagaagaatatcctgattcaggtgaaaatattgttgatgcgctggcagtgttcctgcgccggttgcattcgattcctgtttgtaattgtccttttaacagcgatcgcgtatttcgtctcgctcaggcgcaatcacgaatgaataacggtttggttgatgcgagtgattttgatgacgagcgtaatggctggcctgttgaacaagtctggaaagaaatgcataaacttttgccattctcaccggattcagtcgtcactcatggtgatttctcacttgataaccttatttttgacgaggggaaattaataggttgtattgatgttggacgagtcggaatcgcagaccgataccaggatcttgccatcctatggaactgcctcggtgagttttctccttcattacagaaacggctttttcaaaaatatggtattgataatcctgatatgaataaattgcagtttcatttgatgctcgatgagtttttctaatctcatgaccaaaatcccttaacgtgagttttcgttccactgagcgtcagaccccgtagaaaagatcaaaggatcttcttgagatcctttttttctgcgcgtaatctgctgcttgcaaacaaaaaaaccaccgctaccagcggtggtttgtttgccggatcaagagctaccaactctttttccgaaggtaactggcttcagcagagcgcagataccaaatactgtccttctagtgtagccgtagttaggccaccacttcaagaactctgtagcaccgcctacatacctcgctctgctaatcctgttaccagtggctgctgccagtggcgataagtcgtgtcttaccgggttggactcaagacgatagttaccggataaggcgcagcggtcgggctgaacggggggttcgtgcacacagcccagcttggagcgaacgacctacaccgaactgagatacctacagcgtgagctatgagaaagcgccacgcttcccgaagggagaaaggcggacaggtatccggtaagcggcagggtcggaacaggagagcgcacgagggagcttccagggggaaacgcctggtatctttatagtcctgtcgggtttcgccacctctgacttgagcgtcgatttttgtgatgctcgtcaggggggcggagcctatggaaaaacgccagcaacgcggcctttttacggttcctggccttttgctggccttttgctcacatgt

SEQ ID NO: 274 - DNA, 4748 bp, synthetic construct
  misc_feature 1..4748: note = Description of Artificial Sequence: Syntheticpolynucleotide
  source 1..4748: mol_type = other DNA
ctgcgcgctcgctcgctcactgaggccgcccgggcgtcgggcgacctttggtcgcccggcctcagtgagcgagcgagcgcgcagagagggagtggccaactccatcactaggggttcctgcggccgcacgcgtgacattgattattgactagttattaatagtaatcaattacggggtcattagttcatagcccatatatggagttccgcgttacataacttacggtaaatggcccgcctggctgaccgcccaacgacccccgcccattgacgtcaataatgacgtatgttcccatagtaacgccaatagggactttccattgacgtcaatgggtggactatttacggtaaactgcccacttggcagtacatcaagtgtatcatatgccaagtacgccccctattgacgtcaatgacggtaaatggcccgcctggcattatgcccagtacatgaccttatgggactttcctacttggcagtacatctacgtattagtcatcgctattaccatgggtcgaggtgagccccacgttctgcttcactctccccatctcccccccctccccacccccaattttgtatttatttattttttaattattttgtgcagcgatgggggcggggggggggggggcgcgcgccaggcggggcggggcggggcgaggggcggggcggggcgaggcggagaggtgcggcggcagccaatcagagcggcgcgctccgaaagtttccttttatggcgaggcggcggcggcggcggccctataaaaagcgaagcgcgcggcgggcgggagtcgctgcgttgccttcgccccgtgccccgctccgcgccgcctcgcgccgcccgccccggctctgactgaccgcgttactcccacaggtgagcgggcgggacggcccttctcctccgggctgtaattagcgcttggtttaatgacggctcgtttcttttctgtggctgcgtgaaagccttaaagggctccgggagggccctttgtgcgggggggagcggctcggggggtgcgtgcgtgtgtgtgtgcgtggggagcgccgcgtgcggcccgcgctgcccggcggctgtgagcgctgcgggcgcggcgcggggctttgtgcgctccgcgtgtgcgcgaggggagcgcggccgggggcggtgccccgcggtgcgggggggctgcgaggggaacaaaggctgcgtgcggggtgtgtgcgtgggggggtgagcagggggtgtgggcgcggcggtcgggctgtaacccccccctgcacccccctccccgagttgctgagcacggcccggcttcgggtgcggggctccgtgcggggcgtggcgcggggctcgccgtgccgggcggggggtggcggcaggtgggggtgccgggcggggcggggccgcctcgggccggggagggctcgggggaggggcgcggcggcccccggagcgccggcggctgtcgaggcgcggcgagccgcagccattgccttttatggtaatcgtgcgagagggcgcagggacttcctttgtcccaaatctgtgcggagccgaaatctgggaggcgccgccgcaccccctctagcgggcgcggggcgaagcggtgcggcgccggcaggaaggaaatgggcggggagggccttcgtgcgtcgccgcgccgccgtccccttctccctctccagcctcggggctgtccgcggggggacggctgccttcgggggggacggggcagggcggggttcggcttctggcgtgtgaccggcggctctagagcctctgctaaccatgttcatgccttcttctttttcctacagctcctgggcaacgtgctggttattgtgaccggtcgctagccaccatggctgaagcccctcctagaaggcttggactgggacctcctcctggggatgctcctagagctgaactggtggctctgacagccgtgcagtctgaacaaggcgaagctggtggcggcggatctccacgtagacttggactgctgggaagccctcttcctcctggtgctccacttcctggacctggcagtggatctggatctgcctgtggccagagaagctctgccgctcacaagagataccggcggctgcagaactgggtgtacaacgtgctggaaagacccagaggctgggccttcgtgtaccacgtgttcatctttctgctggtgttcagctgcctggtgctgtccgtgctgagcaccatccaagaacatcaagagctggctaacgagtgcctgttaatactggagtttgtgatgattgtggtgttcggcctcgagtacatcgtccgcgtttggagcgccggctgctgctgcagatatagaggttggcaaggcagattccgcttcgccagaaagcccttctgcgtgatcgacttcatcgtgttcgtggccagcgtggccgtgattgctgctggcacacagggcaacatcttcgccacaagcgccctgcggagcatgcggtttctgcagatcctgagaatggtccgaatggacagaagaggcggcacctggaagctgctgggctctgtggtgtacgcccacagcaaagagctgatcaccgcctggtacatcggatttctggtgctgatcttcgcctccttcctggtgtacctggccgagaaggacgccaacagcgactttagcagctacgccgactctctttggtggggcaccatcacactgaccaccatcggctacggcgacaagacccctcacacatggctgggaagagtgctggccgctggatttgctctgctgggcatcagctttttcgccctgcctgccggaatcctcggatctggctttgccctgaaggtgcaagagcagcaccggcagaagcacttcgagaagagaagaatgcctgccgccaacctgattcaggccgcttggagactgtacagcaccgacatgagcagagcctacctgaccgccacgtggtattattacgactcgatcctgcctagcttccgcgaactggccctgctgtttgagcatgtgcagagagccagaaacggcggcctcagacctctggaagttcggagagcacctgtgcctgatggcgccccttctagatatcctccagtggccacctgtcacagacccggcagcacatctttttgccctggcgagtctagccggatgggcatcaaggacagaatcagaatgggcagcagccagcggagaacaggcccttctaaacagcatctggcccctccaaccatgcctacaagccctagctctgagcaagtgggcgaagccacctctcctaccaaggtgcagaagtcctggtccttcaacgaccggaccagattcagagccagcctgagactgaagcccagaacctctgccgaggatgccccttctgaagaggtggccgaagagaagtcctaccagtgcgagctgaccgtggacgacatcatgccagccgtgaaaaccgtgatacggtctatccggatcctgaagttcctggtggccaagcggaagttcaaagagacactgcggccctacgacgtgaaggacgtgatcgagcagtattctgccggccacctggacatgctgggcagaatcaagagcctgcagaccagagtggaccagatcgttggaagaggcccaggcgacagaaaggccagagagaagggcgataagggcccatctgatgccgaggttgtcgacgagatatcaatgatgggcagagtggtcaaggtggaaaaacaggtgcagagcatcgagcacaagctggacctgctgctgggattctacagccggtgtctgagaagcggcacatctgcatctctgggcgctgtgcaggtcccactgttcgaccctgatatcaccagcgactatcacagccccgtggaccacgaggacatctccgtttctgctcagaccctgagcatcagcagatccgtgtccaccaacatggactaataagagctcgctgatcagcctcgactgtgccttctagttgccagccatctgttgtttgcccctcccccgtgccttccttgaccctggaaggtgccactcccactgtcctttcctaataaaatgaggaaattgcatcgcattgtctgagtaggtgtcattctattctggggggtggggtggggcaggacagcaagggggaggattgggaagacaatagcaggcatgctggggatgcggtgggctctatggttaattaaggtcgggcaggaagagggcctatttcccatgattccttcatatttgcatatacgatacaaggctgttagagagataattagaattaatttgactgtaaacacaaagatattagtacaaaatacgtgacgtagaaagtaataatttcttgggtagtttgcagttttaaaattatgttttaaaatggactatcatatgcttaccgtaacttgaaagtatttcgatttcttggctttatatatcttgtggaaaggacgaaacaccgaggagcaccaggaacttgccagtttaagtactctgtgctggaaacagcacagaatctacttaaacaaggcaaaatgccgtgtttatctcgtcaacttgttggcgagattttttctaaagcttgaattcaagcttgaattcagctgacgtgcctcggaccgctaggaacccctagtgatggagttggccactccctctctgcgcgctcgctcgctcactgaggccgggcgaccaaaggtcgcccgacgcccgggctttgcccgggcggcctcagtgagcgagcgagcgcgcag

SEQ ID NO: 275 - DNA, 4748 bp, synthetic construct
  misc_feature 1..4748: note = Description of Artificial Sequence: Syntheticpolynucleotide
  source 1..4748: mol_type = other DNA
ctgcgcgctcgctcgctcactgaggccgcccgggcgtcgggcgacctttggtcgcccggcctcagtgagcgagcgagcgcgcagagagggagtggccaactccatcactaggggttcctgcggccgcacgcgtgacattgattattgactagttattaatagtaatcaattacggggtcattagttcatagcccatatatggagttccgcgttacataacttacggtaaatggcccgcctggctgaccgcccaacgacccccgcccattgacgtcaataatgacgtatgttcccatagtaacgccaatagggactttccattgacgtcaatgggtggactatttacggtaaactgcccacttggcagtacatcaagtgtatcatatgccaagtacgccccctattgacgtcaatgacggtaaatggcccgcctggcattatgcccagtacatgaccttatgggactttcctacttggcagtacatctacgtattagtcatcgctattaccatgggtcgaggtgagccccacgttctgcttcactctccccatctcccccccctccccacccccaattttgtatttatttattttttaattattttgtgcagcgatgggggcggggggggggggggcgcgcgccaggcggggcggggcggggcgaggggcggggcggggcgaggcggagaggtgcggcggcagccaatcagagcggcgcgctccgaaagtttccttttatggcgaggcggcggcggcggcggccctataaaaagcgaagcgcgcggcgggcgggagtcgctgcgttgccttcgccccgtgccccgctccgcgccgcctcgcgccgcccgccccggctctgactgaccgcgttactcccacaggtgagcgggcgggacggcccttctcctccgggctgtaattagcgcttggtttaatgacggctcgtttcttttctgtggctgcgtgaaagccttaaagggctccgggagggccctttgtgcgggggggagcggctcggggggtgcgtgcgtgtgtgtgtgcgtggggagcgccgcgtgcggcccgcgctgcccggcggctgtgagcgctgcgggcgcggcgcggggctttgtgcgctccgcgtgtgcgcgaggggagcgcggccgggggcggtgccccgcggtgcgggggggctgcgaggggaacaaaggctgcgtgcggggtgtgtgcgtgggggggtgagcagggggtgtgggcgcggcggtcgggctgtaacccccccctgcacccccctccccgagttgctgagcacggcccggcttcgggtgcggggctccgtgcggggcgtggcgcggggctcgccgtgccgggcggggggtggcggcaggtgggggtgccgggcggggcggggccgcctcgggccggggagggctcgggggaggggcgcggcggcccccggagcgccggcggctgtcgaggcgcggcgagccgcagccattgccttttatggtaatcgtgcgagagggcgcagggacttcctttgtcccaaatctgtgcggagccgaaatctgggaggcgccgccgcaccccctctagcgggcgcggggcgaagcggtgcggcgccggcaggaaggaaatgggcggggagggccttcgtgcgtcgccgcgccgccgtccccttctccctctccagcctcggggctgtccgcggggggacggctgccttcgggggggacggggcagggcggggttcggcttctggcgtgtgaccggcggctctagagcctctgctaaccatgttcatgccttcttctttttcctacagctcctgggcaacgtgctggttattgtgaccggtcgctagccaccatggctgaagcccctcctagaaggcttggactgggacctcctcctggggatgctcctagagctgaactggtggctctgacagccgtgcagtctgaacaaggcgaagctggtggcggcggatctccacgtagacttggactgctgggaagccctcttcctcctggtgctccacttcctggacctggcagtggatctggatctgcctgtggccagagaagctctgccgctcacaagagataccggcggctgcagaactgggtgtacaacgtgctggaaagacccagaggctgggccttcgtgtaccacgtgttcatctttctgctggtgttcagctgcctggtgctgtccgtgctgagcaccatccaagaacatcaagagctggctaacgagtgcctgttaatactggagtttgtgatgattgtggtgttcggcctcgagtacatcgtccgcgtttggagcgccggctgctgctgcagatatagaggttggcaaggcagattccgcttcgccagaaagcccttctgcgtgatcgacttcatcgtgttcgtggccagcgtggccgtgattgctgctggcacacagggcaacatcttcgccacaagcgccctgcggagcatgcggtttctgcagatcctgagaatggtccgaatggacagaagaggcggcacctggaagctgctgggctctgtggtgtacgcccacagcaaagagctgatcaccgcctggtacatcggatttctggtgctgatcttcgcctccttcctggtgtacctggccgagaaggacgccaacagcgactttagcagctacgccgactctctttggtggggcaccatcacactgaccaccatcggctacggcgacaagacccctcacacatggctgggaagagtgctggccgctggatttgctctgctgggcatcagctttttcgccctgcctgccggaatcctcggatctggctttgccctgaaggtgcaagagcagcaccggcagaagcacttcgagaagagaagaatgcctgccgccaacctgattcaggccgcttggagactgtacagcaccgacatgagcagagcctacctgaccgccacgtggtattattacgactcgatcctgcctagcttccgcgaactggccctgctgtttgagcatgtgcagagagccagaaacggcggcctcagacctctggaagttcggagagcacctgtgcctgatggcgccccttctagatatcctccagtggccacctgtcacagacccggcagcacatctttttgccctggcgagtctagccggatgggcatcaaggacagaatcagaatgggcagcagccagcggagaacaggcccttctaaacagcatctggcccctccaaccatgcctacaagccctagctctgagcaagtgggcgaagccacctctcctaccaaggtgcagaagtcctggtccttcaacgaccggaccagattcagagccagcctgagactgaagcccagaacctctgccgaggatgccccttctgaagaggtggccgaagagaagtcctaccagtgcgagctgaccgtggacgacatcatgccagccgtgaaaaccgtgatacggtctatccggatcctgaagttcctggtggccaagcggaagttcaaagagacactgcggccctacgacgtgaaggacgtgatcgagcagtattctgccggccacctggacatgctgggcagaatcaagagcctgcagaccagagtggaccagatcgttggaagaggcccaggcgacagaaaggccagagagaagggcgataagggcccatctgatgccgaggttgtcgacgagatatcaatgatgggcagagtggtcaaggtggaaaaacaggtgcagagcatcgagcacaagctggacctgctgctgggattctacagccggtgtctgagaagcggcacatctgcatctctgggcgctgtgcaggtcccactgttcgaccctgatatcaccagcgactatcacagccccgtggaccacgaggacatctccgtttctgctcagaccctgagcatcagcagatccgtgtccaccaacatggactaataagagctcgctgatcagcctcgactgtgccttctagttgccagccatctgttgtttgcccctcccccgtgccttccttgaccctggaaggtgccactcccactgtcctttcctaataaaatgaggaaattgcatcgcattgtctgagtaggtgtcattctattctggggggtggggtggggcaggacagcaagggggaggattgggaagacaatagcaggcatgctggggatgcggtgggctctatggttaattaaggtcgggcaggaagagggcctatttcccatgattccttcatatttgcatatacgatacaaggctgttagagagataattagaattaatttgactgtaaacacaaagatattagtacaaaatacgtgacgtagaaagtaataatttcttgggtagtttgcagttttaaaattatgttttaaaatggactatcatatgcttaccgtaacttgaaagtatttcgatttcttggctttatatatcttgtggaaaggacgaaacaccgaagccaaagaccacaatcatcgtttaagtactctgtgctggaaacagcacagaatctacttaaacaaggcaaaatgccgtgtttatctcgtcaacttgttggcgagattttttctaaagcttgaattcaagcttgaattcagctgacgtgcctcggaccgctaggaacccctagtgatggagttggccactccctctctgcgcgctcgctcgctcactgaggccgggcgaccaaaggtcgcccgacgcccgggctttgcccgggcggcctcagtgagcgagcgagcgcgcag

SEQ ID NO: 276 - DNA, 4218 bp, synthetic construct
  misc_feature 1..4218: note = Description of Artificial Sequence: Syntheticpolynucleotide
  source 1..4218: mol_type = other DNA
ctgcgcgctcgctcgctcactgaggccgcccgggcgtcgggcgacctttggtcgcccggcctcagtgagcgagcgagcgcgcagagagggagtggccaactccatcactaggggttcctgcggccgcacgcgtcgttacataacttacggtaaatggcccgcctggctgaccgcccaacgacccccgcccattgacgtcaataatgacgtatgttcccatagtaacgccaatagggactttccattgacgtcaatgggtggagtatttacggtaaactgcccacttggcagtacatcaagtgtatcatatgccaagtacgccccctattgacgtcaatgacggtaaatggcccgcctggcattatgcccagtacatgaccttatgggactttcctacttggcagtacatctacgtattagtcatcgctattaccatggtgatgcggttttggcagtacatcaatgggcgtggatagcggtttgactcacggggatttccaagtctccaccccattgacgtcaatgggagtttgttttggcaccaaaatcaacgggactttccaaaatgtcgtaacaactccgccccattgacgcaaatgggcggtaggcgtgtacggtgggaggtctatataagcagagctcgtttagtgaaccgtcagatcgcctggagacgcaccggtgccaccatggcccctaagaagaagcggaaagtcggcagcggcaagcggaactatatcctgggcctcgccatcggcatcaccagcgttggctacggcatcatcgactacgagacacgggacgtgatcgatgccggcgtgcggctgtttaaagaggccaacgtcgagaacaacgagggccgcagatctaagagaggcgccagacggctgaagcggagaagaaggcacagaatccagagagtgaagaagctgctgttcgactacaacctgctgaccgaccacagcgagctgagcggcatcaatccttacgaggccagagtgaagggcctgagccagaagctgagcgaggaagagtttagcgccgctctgctgcacctggccaagagaagaggcgtgcacaacgtgaacgaggtggaagaggacaccggcaacgagctgtccaccaaagagcagatcagccggaacagcaaggccctggaagagaaatacgtggccgaactgcagctggaacggctgaaaaaggatggcgaagtgcggggcagcatcaatcggttcaagaccagcgactacgtgaaagaagccaaacagctgctgaaggtgcagaaggcctaccaccagctggaccagagcttcatcgacacctacatcgacctgctggaaacccggcggacctactatgaaggacctggcgagggaagccccttcggctggaaggacatcaaagaatggtacgagatgctgatgggccactgcacctactttcccgaggaactgcggagcgtgaagtacgcctacaacgccgacctgtacaacgccctgaacgacctgaacaacctcgtgatcacccgggacgagaacgagaagctggaatattacgagaagttccagatcatcgagaacgtgttcaagcagaagaagaaacccacgctgaagcagatcgccaaagagatcctggtcaacgaggaagatatcaagggctacagagtgaccagcaccggcaagcccgagttcaccaacctgaaggtgtaccacgacatcaaggatatcacagcccggaaagagattattgagaacgccgagctgctggaccaaatcgccaagatcctgaccatctaccagagcagcgaggacatccaagaggaactgaccaatctgaactccgagctgacccaagaagagatcgagcagatctctaatctgaaggggtacaccggcacacacaacctgagcctgaaggccatcaacctgatcctggacgagctgtggcacaccaacgacaaccagattgccatcttcaacaggctgaagctggtgcccaagaaggtggacctgtctcagcagaaagaaatccccaccacactggtggacgacttcattctgagccccgtggtcaagaggagcttcatccagagcatcaaagtgatcaacgccatcatcaagaagtacgggctgcccaacgatatcatcatcgagctggcccgcgagaagaactccaaggacgcccagaaaatgatcaacgagatgcagaagaggaaccgccagaccaacgagcggatcgaggaaatcatccggaccaccggcaaagagaacgccaagtacctgatcgagaagatcaagctgcacgacatgcaagagggcaagtgcctgtacagcctggaagccattcctctggaagatctgctgaacaatcccttcaactatgaggtggaccacatcatccccagaagcgtgtccttcgacaacagcttcaacaacaaggtgctcgtgaagcaagaggaagccagcaagaagggcaacagaaccccattccagtacctgagcagcagcgacagcaagatcagctacgaaaccttcaagaagcacatcctgaatctggccaaaggcaagggcagaatcagcaagaccaagaaagaatacctgctcgaggaacgggacatcaacagattcagcgtgcagaaagacttcatcaatcggaacctggtggacaccagatacgccaccagaggcctgatgaatctgctgcggagctacttcagagtgaacaatctggacgtgaaagtcaagtccatcaacggcggcttcaccagctttctgcggcggaagtggaagttcaagaaagagcggaacaagggctataagcaccacgccgaggacgccctgatcattgccaacgccgatttcatcttcaaagagtggaagaaactggacaaggccaaaaaagtgatggaaaaccagatgttcgaggaaaagcaggccgagagcatgcccgagatcgaaaccgagcaagagtacaaagagattttcatcacgccccaccagatcaagcacattaaggacttcaaggactacaagtacagccaccgcgtggacaagaagcccaatagagagctgattaacgacaccctgtactctacccggaaggacgacaagggcaataccctgatcgtcaacaacctgaacggcctgtacgacaaggacaacgacaagctcaagaagctgatcaacaagagccccgagaaactgctgatgtaccaccacgatcctcagacctaccagaaactgaagctcatcatggaacagtacggcgacgagaagaatcccctgtacaagtactacgaggaaaccgggaactacctgaccaagtactccaaaaaggacaatgggcccgtgatcaagaagattaagtattacggcaacaagctgaatgcccacctggacatcaccgacgactaccccaacagcagaaacaaggtggtcaagctgtccctgaagccttacagattcgacgtgtacctggacaacggcgtgtacaagttcgtgaccgtgaagaacctggacgtcatcaaaaaagaaaactactacgaagtcaacagcaagtgctatgaggaagccaagaaactcaagaaaatcagcaaccaggccgagtttatcgcctccttctacaacaacgatctgatcaagatcaacggggagctgtatagagtgatcggcgtgaacaatgacctgctgaaccggatcgaagtgaacatgatcgacatcacctaccgcgagtacctcgagaacatgaacgataagcggcctccacggatcattaagacaatcgccagcaagacgcagagcattaagaagtacagcacagacatcctgggcaacctgtacgaagtgaagtctaagaagcacccgcagattatcaagaaaggcagcggcgctcccaagaaaaaacggaaggtttaagagctcgctgatcagcctcgataagatacattgatgagtttggacaaaccacaactagaatgcagtgaaaaaaatgctttatttgtgaaatttgtgatgctattgctttatttgtaaccattataagctgcaataaacaagttaagcttgaattcagctgacgtgcctcggaccgctaggaacccctagtgatggagttggccactccctctctgcgcgctcgctcgctcactgaggccgggcgaccaaaggtcgcccgacgcccgggctttgcccgggcggcctcagtgagcgagcgagcgcgcag

SEQ ID NO: 277 - DNA, 3914 bp, synthetic construct
  misc_feature 1..3914: note = Description of Artificial Sequence: Syntheticpolynucleotide
  source 1..3914: mol_type = other DNA
ctgcgcgctcgctcgctcactgaggccgcccgggcgtcgggcgacctttggtcgcccggcctcagtgagcgagcgagcgcgcagagagggagtggccaactccatcactaggggttcctgcggccgcacgcgtgtgatgcggttttggcagtacatcaatgggcgtggatagcggtttgactcacggggatttccaagtctccaccccattgacgtcaatgggagtttgttttggcaccaaaatcaacgggactttccaaaatgtcgtaacaactccgccccattgacgcaaatgggcggtaggcgtgtacggtgggaggtctatataagcagagctcgtttagtgaaccgtcagatcgcctggagacgcaccggtgccaccatggcccctaagaagaagcggaaagtcggcagcggcaagcggaactatatcctgggcctcgccatcggcatcaccagcgttggctacggcatcatcgactacgagacacgggacgtgatcgatgccggcgtgcggctgtttaaagaggccaacgtcgagaacaacgagggccgcagatctaagagaggcgccagacggctgaagcggagaagaaggcacagaatccagagagtgaagaagctgctgttcgactacaacctgctgaccgaccacagcgagctgagcggcatcaatccttacgaggccagagtgaagggcctgagccagaagctgagcgaggaagagtttagcgccgctctgctgcacctggccaagagaagaggcgtgcacaacgtgaacgaggtggaagaggacaccggcaacgagctgtccaccaaagagcagatcagccggaacagcaaggccctggaagagaaatacgtggccgaactgcagctggaacggctgaaaaaggatggcgaagtgcggggcagcatcaatcggttcaagaccagcgactacgtgaaagaagccaaacagctgctgaaggtgcagaaggcctaccaccagctggaccagagcttcatcgacacctacatcgacctgctggaaacccggcggacctactatgaaggacctggcgagggaagccccttcggctggaaggacatcaaagaatggtacgagatgctgatgggccactgcacctactttcccgaggaactgcggagcgtgaagtacgcctacaacgccgacctgtacaacgccctgaacgacctgaacaacctcgtgatcacccgggacgagaacgagaagctggaatattacgagaagttccagatcatcgagaacgtgttcaagcagaagaagaaacccacgctgaagcagatcgccaaagagatcctggtcaacgaggaagatatcaagggctacagagtgaccagcaccggcaagcccgagttcaccaacctgaaggtgtaccacgacatcaaggatatcacagcccggaaagagattattgagaacgccgagctgctggaccaaatcgccaagatcctgaccatctaccagagcagcgaggacatccaagaggaactgaccaatctgaactccgagctgacccaagaagagatcgagcagatctctaatctgaaggggtacaccggcacacacaacctgagcctgaaggccatcaacctgatcctggacgagctgtggcacaccaacgacaaccagattgccatcttcaacaggctgaagctggtgcccaagaaggtggacctgtctcagcagaaagaaatccccaccacactggtggacgacttcattctgagccccgtggtcaagaggagcttcatccagagcatcaaagtgatcaacgccatcatcaagaagtacgggctgcccaacgatatcatcatcgagctggcccgcgagaagaactccaaggacgcccagaaaatgatcaacgagatgcagaagaggaaccgccagaccaacgagcggatcgaggaaatcatccggaccaccggcaaagagaacgccaagtacctgatcgagaagatcaagctgcacgacatgcaagagggcaagtgcctgtacagcctggaagccattcctctggaagatctgctgaacaatcccttcaactatgaggtggaccacatcatccccagaagcgtgtccttcgacaacagcttcaacaacaaggtgctcgtgaagcaagaggaagccagcaagaagggcaacagaaccccattccagtacctgagcagcagcgacagcaagatcagctacgaaaccttcaagaagcacatcctgaatctggccaaaggcaagggcagaatcagcaagaccaagaaagaatacctgctcgaggaacgggacatcaacagattcagcgtgcagaaagacttcatcaatcggaacctggtggacaccagatacgccaccagaggcctgatgaatctgctgcggagctacttcagagtgaacaatctggacgtgaaagtcaagtccatcaacggcggcttcaccagctttctgcggcggaagtggaagttcaagaaagagcggaacaagggctataagcaccacgccgaggacgccctgatcattgccaacgccgatttcatcttcaaagagtggaagaaactggacaaggccaaaaaagtgatggaaaaccagatgttcgaggaaaagcaggccgagagcatgcccgagatcgaaaccgagcaagagtacaaagagattttcatcacgccccaccagatcaagcacattaaggacttcaaggactacaagtacagccaccgcgtggacaagaagcccaatagagagctgattaacgacaccctgtactctacccggaaggacgacaagggcaataccctgatcgtcaacaacctgaacggcctgtacgacaaggacaacgacaagctcaagaagctgatcaacaagagccccgagaaactgctgatgtaccaccacgatcctcagacctaccagaaactgaagctcatcatggaacagtacggcgacgagaagaatcccctgtacaagtactacgaggaaaccgggaactacctgaccaagtactccaaaaaggacaatgggcccgtgatcaagaagattaagtattacggcaacaagctgaatgcccacctggacatcaccgacgactaccccaacagcagaaacaaggtggtcaagctgtccctgaagccttacagattcgacgtgtacctggacaacggcgtgtacaagttcgtgaccgtgaagaacctggacgtcatcaaaaaagaaaactactacgaagtcaacagcaagtgctatgaggaagccaagaaactcaagaaaatcagcaaccaggccgagtttatcgcctccttctacaacaacgatctgatcaagatcaacggggagctgtatagagtgatcggcgtgaacaatgacctgctgaaccggatcgaagtgaacatgatcgacatcacctaccgcgagtacctcgagaacatgaacgataagcggcctccacggatcattaagacaatcgccagcaagacgcagagcattaagaagtacagcacagacatcctgggcaacctgtacgaagtgaagtctaagaagcacccgcagattatcaagaaaggcagcggcgctcccaagaaaaaacggaaggtttaagagctcgctgatcagcctcgataagatacattgatgagtttggacaaaccacaactagaatgcagtgaaaaaaatgctttatttgtgaaatttgtgatgctattgctttatttgtaaccattataagctgcaataaacaagttaagcttgaattcagctgacgtgcctcggaccgctaggaacccctagtgatggagttggccactccctctctgcgcgctcgctcgctcactgaggccgggcgaccaaaggtcgcccgacgcccgggctttgcccgggcggcctcagtgagcgagcgagcgcgcag

SEQ ID NO: 278 - DNA, 4218 bp, synthetic construct
  misc_feature 1..4218: note = Description of Artificial Sequence: Syntheticpolynucleotide
  source 1..4218: mol_type = other DNA
ctgcgcgctcgctcgctcactgaggccgcccgggcgtcgggcgacctttggtcgcccggcctcagtgagcgagcgagcgcgcagagagggagtggccaactccatcactaggggttcctgcggccgcacgcgtcgttacataacttacggtaaatggcccgcctggctgaccgcccaacgacccccgcccattgacgtcaataatgacgtatgttcccatagtaacgccaatagggactttccattgacgtcaatgggtggagtatttacggtaaactgcccacttggcagtacatcaagtgtatcatatgccaagtacgccccctattgacgtcaatgacggtaaatggcccgcctggcattatgcccagtacatgaccttatgggactttcctacttggcagtacatctacgtattagtcatcgctattaccatggtgatgcggttttggcagtacatcaatgggcgtggatagcggtttgactcacggggatttccaagtctccaccccattgacgtcaatgggagtttgttttggcaccaaaatcaacgggactttccaaaatgtcgtaacaactccgccccattgacgcaaatgggcggtaggcgtgtacggtgggaggtctatataagcagagctcgtttagtgaaccgtcagatcgcctggagacgcaccggtgccaccatggcccctaagaagaagcggaaagtcggcagcggcaagcggaactatatcctgggcctcgacatcggcatcaccagcgttggctacggcatcatcgactacgagacacgggacgtgatcgatgccggcgtgcggctgtttaaagaggccaacgtcgagaacaacgagggccgcagatctaagagaggcgccagacggctgaagcggagaagaaggcacagaatccagagagtgaagaagctgctgttcgactacaacctgctgaccgaccacagcgagctgagcggcatcaatccttacgaggccagagtgaagggcctgagccagaagctgagcgaggaagagtttagcgccgctctgctgcacctggccaagagaagaggcgtgcacaacgtgaacgaggtggaagaggacaccggcaacgagctgtccaccaaagagcagatcagccggaacagcaaggccctggaagagaaatacgtggccgaactgcagctggaacggctgaaaaaggatggcgaagtgcggggcagcatcaatcggttcaagaccagcgactacgtgaaagaagccaaacagctgctgaaggtgcagaaggcctaccaccagctggaccagagcttcatcgacacctacatcgacctgctggaaacccggcggacctactatgaaggacctggcgagggaagccccttcggctggaaggacatcaaagaatggtacgagatgctgatgggccactgcacctactttcccgaggaactgcggagcgtgaagtacgcctacaacgccgacctgtacaacgccctgaacgacctgaacaacctcgtgatcacccgggacgagaacgagaagctggaatattacgagaagttccagatcatcgagaacgtgttcaagcagaagaagaaacccacgctgaagcagatcgccaaagagatcctggtcaacgaggaagatatcaagggctacagagtgaccagcaccggcaagcccgagttcaccaacctgaaggtgtaccacgacatcaaggatatcacagcccggaaagagattattgagaacgccgagctgctggaccaaatcgccaagatcctgaccatctaccagagcagcgaggacatccaagaggaactgaccaatctgaactccgagctgacccaagaagagatcgagcagatctctaatctgaaggggtacaccggcacacacaacctgagcctgaaggccatcaacctgatcctggacgagctgtggcacaccaacgacaaccagattgccatcttcaacaggctgaagctggtgcccaagaaggtggacctgtctcagcagaaagaaatccccaccacactggtggacgacttcattctgagccccgtggtcaagaggagcttcatccagagcatcaaagtgatcaacgccatcatcaagaagtacgggctgcccaacgatatcatcatcgagctggcccgcgagaagaactccaaggacgcccagaaaatgatcaacgagatgcagaagaggaaccgccagaccaacgagcggatcgaggaaatcatccggaccaccggcaaagagaacgccaagtacctgatcgagaagatcaagctgcacgacatgcaagagggcaagtgcctgtacagcctggaagccattcctctggaagatctgctgaacaatcccttcaactatgaggtggaccacatcatccccagaagcgtgtccttcgacaacagcttcaacaacaaggtgctcgtgaagcaagaggaaaacagcaagaagggcaacagaaccccattccagtacctgagcagcagcgacagcaagatcagctacgaaaccttcaagaagcacatcctgaatctggccaaaggcaagggcagaatcagcaagaccaagaaagaatacctgctcgaggaacgggacatcaacagattcagcgtgcagaaagacttcatcaatcggaacctggtggacaccagatacgccaccagaggcctgatgaatctgctgcggagctacttcagagtgaacaatctggacgtgaaagtcaagtccatcaacggcggcttcaccagctttctgcggcggaagtggaagttcaagaaagagcggaacaagggctataagcaccacgccgaggacgccctgatcattgccaacgccgatttcatcttcaaagagtggaagaaactggacaaggccaaaaaagtgatggaaaaccagatgttcgaggaaaagcaggccgagagcatgcccgagatcgaaaccgagcaagagtacaaagagattttcatcacgccccaccagatcaagcacattaaggacttcaaggactacaagtacagccaccgcgtggacaagaagcccaatagagagctgattaacgacaccctgtactctacccggaaggacgacaagggcaataccctgatcgtcaacaacctgaacggcctgtacgacaaggacaacgacaagctcaagaagctgatcaacaagagccccgagaaactgctgatgtaccaccacgatcctcagacctaccagaaactgaagctcatcatggaacagtacggcgacgagaagaatcccctgtacaagtactacgaggaaaccgggaactacctgaccaagtactccaaaaaggacaatgggcccgtgatcaagaagattaagtattacggcaacaagctgaatgcccacctggacatcaccgacgactaccccaacagcagaaacaaggtggtcaagctgtccctgaagccttacagattcgacgtgtacctggacaacggcgtgtacaagttcgtgaccgtgaagaacctggacgtcatcaaaaaagaaaactactacgaagtcaacagcaagtgctatgaggaagccaagaaactcaagaaaatcagcaaccaggccgagtttatcgcctccttctacaacaacgatctgatcaagatcaacggggagctgtatagagtgatcggcgtgaacaatgacctgctgaaccggatcgaagtgaacatgatcgacatcacctaccgcgagtacctcgagaacatgaacgataagcggcctccacggatcattaagacaatcgccagcaagacgcagagcattaagaagtacagcacagacatcctgggcaacctgtacgaagtgaagtctaagaagcacccgcagattatcaagaaaggcagcggcgctcccaagaaaaaacggaaggtttaagagctcgctgatcagcctcgataagatacattgatgagtttggacaaaccacaactagaatgcagtgaaaaaaatgctttatttgtgaaatttgtgatgctattgctttatttgtaaccattataagctgcaataaacaagttaagcttgaattcagctgacgtgcctcggaccgctaggaacccctagtgatggagttggccactccctctctgcgcgctcgctcgctcactgaggccgggcgaccaaaggtcgcccgacgcccgggctttgcccgggcggcctcagtgagcgagcgagcgcgcag

SEQ ID NO: 279 - DNA, 3914 bp, synthetic construct
  misc_feature 1..3914: note = Description of Artificial Sequence: Syntheticpolynucleotide
  source 1..3914: mol_type = other DNA
ctgcgcgctcgctcgctcactgaggccgcccgggcgtcgggcgacctttggtcgcccggcctcagtgagcgagcgagcgcgcagagagggagtggccaactccatcactaggggttcctgcggccgcacgcgtgtgatgcggttttggcagtacatcaatgggcgtggatagcggtttgactcacggggatttccaagtctccaccccattgacgtcaatgggagtttgttttggcaccaaaatcaacgggactttccaaaatgtcgtaacaactccgccccattgacgcaaatgggcggtaggcgtgtacggtgggaggtctatataagcagagctcgtttagtgaaccgtcagatcgcctggagacgcaccggtgccaccatggcccctaagaagaagcggaaagtcggcagcggcaagcggaactatatcctgggcctcgacatcggcatcaccagcgttggctacggcatcatcgactacgagacacgggacgtgatcgatgccggcgtgcggctgtttaaagaggccaacgtcgagaacaacgagggccgcagatctaagagaggcgccagacggctgaagcggagaagaaggcacagaatccagagagtgaagaagctgctgttcgactacaacctgctgaccgaccacagcgagctgagcggcatcaatccttacgaggccagagtgaagggcctgagccagaagctgagcgaggaagagtttagcgccgctctgctgcacctggccaagagaagaggcgtgcacaacgtgaacgaggtggaagaggacaccggcaacgagctgtccaccaaagagcagatcagccggaacagcaaggccctggaagagaaatacgtggccgaactgcagctggaacggctgaaaaaggatggcgaagtgcggggcagcatcaatcggttcaagaccagcgactacgtgaaagaagccaaacagctgctgaaggtgcagaaggcctaccaccagctggaccagagcttcatcgacacctacatcgacctgctggaaacccggcggacctactatgaaggacctggcgagggaagccccttcggctggaaggacatcaaagaatggtacgagatgctgatgggccactgcacctactttcccgaggaactgcggagcgtgaagtacgcctacaacgccgacctgtacaacgccctgaacgacctgaacaacctcgtgatcacccgggacgagaacgagaagctggaatattacgagaagttccagatcatcgagaacgtgttcaagcagaagaagaaacccacgctgaagcagatcgccaaagagatcctggtcaacgaggaagatatcaagggctacagagtgaccagcaccggcaagcccgagttcaccaacctgaaggtgtaccacgacatcaaggatatcacagcccggaaagagattattgagaacgccgagctgctggaccaaatcgccaagatcctgaccatctaccagagcagcgaggacatccaagaggaactgaccaatctgaactccgagctgacccaagaagagatcgagcagatctctaatctgaaggggtacaccggcacacacaacctgagcctgaaggccatcaacctgatcctggacgagctgtggcacaccaacgacaaccagattgccatcttcaacaggctgaagctggtgcccaagaaggtggacctgtctcagcagaaagaaatccccaccacactggtggacgacttcattctgagccccgtggtcaagaggagcttcatccagagcatcaaagtgatcaacgccatcatcaagaagtacgggctgcccaacgatatcatcatcgagctggcccgcgagaagaactccaaggacgcccagaaaatgatcaacgagatgcagaagaggaaccgccagaccaacgagcggatcgaggaaatcatccggaccaccggcaaagagaacgccaagtacctgatcgagaagatcaagctgcacgacatgcaagagggcaagtgcctgtacagcctggaagccattcctctggaagatctgctgaacaatcccttcaactatgaggtggaccacatcatccccagaagcgtgtccttcgacaacagcttcaacaacaaggtgctcgtgaagcaagaggaaaacagcaagaagggcaacagaaccccattccagtacctgagcagcagcgacagcaagatcagctacgaaaccttcaagaagcacatcctgaatctggccaaaggcaagggcagaatcagcaagaccaagaaagaatacctgctcgaggaacgggacatcaacagattcagcgtgcagaaagacttcatcaatcggaacctggtggacaccagatacgccaccagaggcctgatgaatctgctgcggagctacttcagagtgaacaatctggacgtgaaagtcaagtccatcaacggcggcttcaccagctttctgcggcggaagtggaagttcaagaaagagcggaacaagggctataagcaccacgccgaggacgccctgatcattgccaacgccgatttcatcttcaaagagtggaagaaactggacaaggccaaaaaagtgatggaaaaccagatgttcgaggaaaagcaggccgagagcatgcccgagatcgaaaccgagcaagagtacaaagagattttcatcacgccccaccagatcaagcacattaaggacttcaaggactacaagtacagccaccgcgtggacaagaagcccaatagagagctgattaacgacaccctgtactctacccggaaggacgacaagggcaataccctgatcgtcaacaacctgaacggcctgtacgacaaggacaacgacaagctcaagaagctgatcaacaagagccccgagaaactgctgatgtaccaccacgatcctcagacctaccagaaactgaagctcatcatggaacagtacggcgacgagaagaatcccctgtacaagtactacgaggaaaccgggaactacctgaccaagtactccaaaaaggacaatgggcccgtgatcaagaagattaagtattacggcaacaagctgaatgcccacctggacatcaccgacgactaccccaacagcagaaacaaggtggtcaagctgtccctgaagccttacagattcgacgtgtacctggacaacggcgtgtacaagttcgtgaccgtgaagaacctggacgtcatcaaaaaagaaaactactacgaagtcaacagcaagtgctatgaggaagccaagaaactcaagaaaatcagcaaccaggccgagtttatcgcctccttctacaacaacgatctgatcaagatcaacggggagctgtatagagtgatcggcgtgaacaatgacctgctgaaccggatcgaagtgaacatgatcgacatcacctaccgcgagtacctcgagaacatgaacgataagcggcctccacggatcattaagacaatcgccagcaagacgcagagcattaagaagtacagcacagacatcctgggcaacctgtacgaagtgaagtctaagaagcacccgcagattatcaagaaaggcagcggcgctcccaagaaaaaacggaaggtttaagagctcgctgatcagcctcgataagatacattgatgagtttggacaaaccacaactagaatgcagtgaaaaaaatgctttatttgtgaaatttgtgatgctattgctttatttgtaaccattataagctgcaataaacaagttaagcttgaattcagctgacgtgcctcggaccgctaggaacccctagtgatggagttggccactccctctctgcgcgctcgctcgctcactgaggccgggcgaccaaaggtcgcccgacgcccgggctttgcccgggcggcctcagtgagcgagcgagcgcgcag

SEQ ID NO: 280 - DNA, 6587 bp, synthetic construct
  misc_feature 1..6587: note = Description of Artificial Sequence: Syntheticpolynucleotide
  source 1..6587: mol_type = other DNA
cctgcaggcagctgcgcgctcgctcgctcactgaggccgcccgggcgtcgggcgacctttggtcgcccggcctcagtgagcgagcgagcgcgcagagagggagtggccaactccatcactaggggttcctgcggccgcacgcgtcgttacataacttacggtaaatggcccgcctggctgaccgcccaacgacccccgcccattgacgtcaataatgacgtatgttcccatagtaacgccaatagggactttccattgacgtcaatgggtggagtatttacggtaaactgcccacttggcagtacatcaagtgtatcatatgccaagtacgccccctattgacgtcaatgacggtaaatggcccgcctggcattatgcccagtacatgaccttatgggactttcctacttggcagtacatctacgtattagtcatcgctattaccatggtgatgcggttttggcagtacatcaatgggcgtggatagcggtttgactcacggggatttccaagtctccaccccattgacgtcaatgggagtttgttttggcaccaaaatcaacgggactttccaaaatgtcgtaacaactccgccccattgacgcaaatgggcggtaggcgtgtacggtgggaggtctatataagcagagctcgtttagtgaaccgtcagatcgcctggagacgcaccggtgccaccatggcccctaagaagaagcggaaagtcggcagcggcaagcggaactatatcctgggcctcgccatcggcatcaccagcgttggctacggcatcatcgactacgagacacgggacgtgatcgatgccggcgtgcggctgtttaaagaggccaacgtcgagaacaacgagggccgcagatctaagagaggcgccagacggctgaagcggagaagaaggcacagaatccagagagtgaagaagctgctgttcgactacaacctgctgaccgaccacagcgagctgagcggcatcaatccttacgaggccagagtgaagggcctgagccagaagctgagcgaggaagagtttagcgccgctctgctgcacctggccaagagaagaggcgtgcacaacgtgaacgaggtggaagaggacaccggcaacgagctgtccaccaaagagcagatcagccggaacagcaaggccctggaagagaaatacgtggccgaactgcagctggaacggctgaaaaaggatggcgaagtgcggggcagcatcaatcggttcaagaccagcgactacgtgaaagaagccaaacagctgctgaaggtgcagaaggcctaccaccagctggaccagagcttcatcgacacctacatcgacctgctggaaacccggcggacctactatgaaggacctggcgagggaagccccttcggctggaaggacatcaaagaatggtacgagatgctgatgggccactgcacctactttcccgaggaactgcggagcgtgaagtacgcctacaacgccgacctgtacaacgccctgaacgacctgaacaacctcgtgatcacccgggacgagaacgagaagctggaatattacgagaagttccagatcatcgagaacgtgttcaagcagaagaagaaacccacgctgaagcagatcgccaaagagatcctggtcaacgaggaagatatcaagggctacagagtgaccagcaccggcaagcccgagttcaccaacctgaaggtgtaccacgacatcaaggatatcacagcccggaaagagattattgagaacgccgagctgctggaccaaatcgccaagatcctgaccatctaccagagcagcgaggacatccaagaggaactgaccaatctgaactccgagctgacccaagaagagatcgagcagatctctaatctgaaggggtacaccggcacacacaacctgagcctgaaggccatcaacctgatcctggacgagctgtggcacaccaacgacaaccagattgccatcttcaacaggctgaagctggtgcccaagaaggtggacctgtctcagcagaaagaaatccccaccacactggtggacgacttcattctgagccccgtggtcaagaggagcttcatccagagcatcaaagtgatcaacgccatcatcaagaagtacgggctgcccaacgatatcatcatcgagctggcccgcgagaagaactccaaggacgcccagaaaatgatcaacgagatgcagaagaggaaccgccagaccaacgagcggatcgaggaaatcatccggaccaccggcaaagagaacgccaagtacctgatcgagaagatcaagctgcacgacatgcaagagggcaagtgcctgtacagcctggaagccattcctctggaagatctgctgaacaatcccttcaactatgaggtggaccacatcatccccagaagcgtgtccttcgacaacagcttcaacaacaaggtgctcgtgaagcaagaggaagccagcaagaagggcaacagaaccccattccagtacctgagcagcagcgacagcaagatcagctacgaaaccttcaagaagcacatcctgaatctggccaaaggcaagggcagaatcagcaagaccaagaaagaatacctgctcgaggaacgggacatcaacagattcagcgtgcagaaagacttcatcaatcggaacctggtggacaccagatacgccaccagaggcctgatgaatctgctgcggagctacttcagagtgaacaatctggacgtgaaagtcaagtccatcaacggcggcttcaccagctttctgcggcggaagtggaagttcaagaaagagcggaacaagggctataagcaccacgccgaggacgccctgatcattgccaacgccgatttcatcttcaaagagtggaagaaactggacaaggccaaaaaagtgatggaaaaccagatgttcgaggaaaagcaggccgagagcatgcccgagatcgaaaccgagcaagagtacaaagagattttcatcacgccccaccagatcaagcacattaaggacttcaaggactacaagtacagccaccgcgtggacaagaagcccaatagagagctgattaacgacaccctgtactctacccggaaggacgacaagggcaataccctgatcgtcaacaacctgaacggcctgtacgacaaggacaacgacaagctcaagaagctgatcaacaagagccccgagaaactgctgatgtaccaccacgatcctcagacctaccagaaactgaagctcatcatggaacagtacggcgacgagaagaatcccctgtacaagtactacgaggaaaccgggaactacctgaccaagtactccaaaaaggacaatgggcccgtgatcaagaagattaagtattacggcaacaagctgaatgcccacctggacatcaccgacgactaccccaacagcagaaacaaggtggtcaagctgtccctgaagccttacagattcgacgtgtacctggacaacggcgtgtacaagttcgtgaccgtgaagaacctggacgtcatcaaaaaagaaaactactacgaagtcaacagcaagtgctatgaggaagccaagaaactcaagaaaatcagcaaccaggccgagtttatcgcctccttctacaacaacgatctgatcaagatcaacggggagctgtatagagtgatcggcgtgaacaatgacctgctgaaccggatcgaagtgaacatgatcgacatcacctaccgcgagtacctcgagaacatgaacgataagcggcctccacggatcattaagacaatcgccagcaagacgcagagcattaagaagtacagcacagacatcctgggcaacctgtacgaagtgaagtctaagaagcacccgcagattatcaagaaaggcagcggcgctcccaagaaaaaacggaaggtttaagagctcgctgatcagcctcgataagatacattgatgagtttggacaaaccacaactagaatgcagtgaaaaaaatgctttatttgtgaaatttgtgatgctattgctttatttgtaaccattataagctgcaataaacaagttaagcttgaattcagctgacgtgcctcggaccgctaggaacccctagtgatggagttggccactccctctctgcgcgctcgctcgctcactgaggccgggcgaccaaaggtcgcccgacgcccgggctttgcccgggcggcctcagtgagcgagcgagcgcgcagctgcctgcaggggcgcctgatgcggtattttctccttacgcatctgtgcggtatttcacaccgcatacgtcaaagcaaccatagtacgcgccctgtagcggcgcattaagcgcggcgggtgtggtggttacgcgcagcgtgaccgctacacttgccagcgccctagcgcccgctcctttcgctttcttcccttcctttctcgccacgttcgccggctttccccgtcaagctctaaatcgggggctccctttagggttccgatttagtgctttacggcacctcgaccccaaaaaacttgatttgggtgatggttcacgtagtgggccatcgccctgatagacggtttttcgccctttgacgttggagtccacgttctttaatagtggactcttgttccaaactggaacaacactcaaccctatctcgggctattcttttgatttataagggattttgccgatttcggcctattggttaaaaaatgagctgatttaacaaaaatttaacgcgaattttaacaaaatattaacgtttacaattttatggtgcactctcagtacaatctgctctgatgccgcatagttaagccagccccgacacccgccaacacccgctgacgcgccctgacgggcttgtctgctcccggcatccgcttacagacaagctgtgaccgtctccgggagctgcatgtgtcagaggttttcaccgtcatcaccgaaacgcgcgagacgaaagggcctcgtgatacgcctatttttataggttaatgtcatgaacaataaaactgtctgcttacataaacagtaatacaaggggtgttatgagccatattcaacgggaaacgtcgaggccgcgattaaattccaacatggatgctgatttatatgggtataaatgggctcgcgataatgtcgggcaatcaggtgcgacaatctatcgcttgtatgggaagcccgatgcgccagagttgtttctgaaacatggcaaaggtagcgttgccaatgatgttacagatgagatggtcagactaaactggctgacggaatttatgcctcttccgaccatcaagcattttatccgtactcctgatgatgcatggttactcaccactgcgatccccggaaaaacagcattccaggtattagaagaatatcctgattcaggtgaaaatattgttgatgcgctggcagtgttcctgcgccggttgcattcgattcctgtttgtaattgtccttttaacagcgatcgcgtatttcgtctcgctcaggcgcaatcacgaatgaataacggtttggttgatgcgagtgattttgatgacgagcgtaatggctggcctgttgaacaagtctggaaagaaatgcataaacttttgccattctcaccggattcagtcgtcactcatggtgatttctcacttgataaccttatttttgacgaggggaaattaataggttgtattgatgttggacgagtcggaatcgcagaccgataccaggatcttgccatcctatggaactgcctcggtgagttttctccttcattacagaaacggctttttcaaaaatatggtattgataatcctgatatgaataaattgcagtttcatttgatgctcgatgagtttttctaatctcatgaccaaaatcccttaacgtgagttttcgttccactgagcgtcagaccccgtagaaaagatcaaaggatcttcttgagatcctttttttctgcgcgtaatctgctgcttgcaaacaaaaaaaccaccgctaccagcggtggtttgtttgccggatcaagagctaccaactctttttccgaaggtaactggcttcagcagagcgcagataccaaatactgtccttctagtgtagccgtagttaggccaccacttcaagaactctgtagcaccgcctacatacctcgctctgctaatcctgttaccagtggctgctgccagtggcgataagtcgtgtcttaccgggttggactcaagacgatagttaccggataaggcgcagcggtcgggctgaacggggggttcgtgcacacagcccagcttggagcgaacgacctacaccgaactgagatacctacagcgtgagctatgagaaagcgccacgcttcccgaagggagaaaggcggacaggtatccggtaagcggcagggtcggaacaggagagcgcacgagggagcttccagggggaaacgcctggtatctttatagtcctgtcgggtttcgccacctctgacttgagcgtcgatttttgtgatgctcgtcaggggggcggagcctatggaaaaacgccagcaacgcggcctttttacggttcctggccttttgctggccttttgctcacatgt

SEQ ID NO: 281 - DNA, 5388 bp, synthetic construct
  misc_feature 1..5388: note = Description of Artificial Sequence: Syntheticpolynucleotide
  source 1..5388: mol_type = other DNA
ctgcgcgctcgctcgctcactgaggccgcccgggcgtcgggcgacctttggtcgcccggcctcagtgagcgagcgagcgcgcagagagggagtggccaactccatcactaggggttcctgcggccgcacgcgtctagatcccatatatggagttccgcgttacataacttacggtaaatggcccgcctggctgaccgcccaacgacccccgcccattgacgtcaataatgacgtatgttcccatagtaacgccaatagggactttccattgacgtcaatgggtggagtatttacggtaaactgcccacttggcagtacatcaagtgtatcatatgccaagtacgccccctattgacgtcaatgacggtaaatggcccgcctggcattatgcccagtacatgaccttatgggactttcctacttggcagtacatctacgtattagtcatcgctattaccatggtgatgcggttttggcagtacatcaatgggcgtggatagcggtttgactcacggggatttccaagtctccaccccattgacgtcaatgggagtttgttttggcaccaaaatcaacgggactttccaaaatgtcgtaacaactccgccccattgacgcaaatgggcggtaggcgtgtacggtgggaggtctatataagcagagctcgtttagtgaaccgtcagatcgcctggagacgcaccggtgccaccatggcccctaagaagaagcggaaagtcggcagcggcaagcggaactatatcctgggcctcgacatcggcatcaccagcgttggctacggcatcatcgactacgagacacgggacgtgatcgatgccggcgtgcggctgtttaaagaggccaacgtcgagaacaacgagggccgcagatctaagagaggcgccagacggctgaagcggagaagaaggcacagaatccagagagtgaagaagctgctgttcgactacaacctgctgaccgaccacagcgagctgagcggcatcaatccttacgaggccagagtgaagggcctgagccagaagctgagcgaggaagagtttagcgccgctctgctgcacctggccaagagaagaggcgtgcacaacgtgaacgaggtggaagaggacaccggcaacgagctgtccaccaaagagcagatcagccggaacagcaaggccctggaagagaaatacgtggccgaactgcagctggaacggctgaaaaaggatggcgaagtgcggggcagcatcaatcggttcaagaccagcgactacgtgaaagaagccaaacagctgctgaaggtgcagaaggcctaccaccagctggaccagagcttcatcgacacctacatcgacctgctggaaacccggcggacctactatgaaggacctggcgagggaagccccttcggctggaaggacatcaaagaatggtacgagatgctgatgggccactgcacctactttcccgaggaactgcggagcgtgaagtacgcctacaacgccgacctgtacaacgccctgaacgacctgaacaacctcgtgatcacccgggacgagaacgagaagctggaatattacgagaagttccagatcatcgagaacgtgttcaagcagaagaagaaacccacgctgaagcagatcgccaaagagatcctggtcaacgaggaagatatcaagggctacagagtgaccagcaccggcaagcccgagttcaccaacctgaaggtgtaccacgacatcaaggatatcacagcccggaaagagattattgagaacgccgagctgctggaccaaatcgccaagatcctgaccatctaccagagcagcgaggacatccaagaggaactgaccaatctgaactccgagctgacccaagaagagatcgagcagatctctaatctgaaggggtacaccggcacacacaacctgagcctgaaggccatcaacctgatcctggacgagctgtggcacaccaacgacaaccagattgccatcttcaacaggctgaagctggtgcccaagaaggtggacctgtctcagcagaaagaaatccccaccacactggtggacgacttcattctgagccccgtggtcaagaggagcttcatccagagcatcaaagtgatcaacgccatcatcaagaagtacgggctgcccaacgatatcatcatcgagctggcccgcgagaagaactccaaggacgcccagaaaatgatcaacgagatgcagaagaggaaccgccagaccaacgagcggatcgaggaaatcatccggaccaccggcaaagagaacgccaagtacctgatcgagaagatcaagctgcacgacatgcaagagggcaagtgcctgtacagcctggaagccattcctctggaagatctgctgaacaatcccttcaactatgaggtggaccacatcatccccagaagcgtgtccttcgacaacagcttcaacaacaaggtgctcgtgaagcaagaggaaaacagcaagaagggcaacagaaccccattccagtacctgagcagcagcgacagcaagatcagctacgaaaccttcaagaagcacatcctgaatctggccaaaggcaagggcagaatcagcaagaccaagaaagaatacctgctcgaggaacgggacatcaacagattcagcgtgcagaaagacttcatcaatcggaacctggtggacaccagatacgccaccagaggcctgatgaatctgctgcggagctacttcagagtgaacaatctggacgtgaaagtcaagtccatcaacggcggcttcaccagctttctgcggcggaagtggaagttcaagaaagagcggaacaagggctataagcaccacgccgaggacgccctgatcattgccaacgccgatttcatcttcaaagagtggaagaaactggacaaggccaaaaaagtgatggaaaaccagatgttcgaggaaaagcaggccgagagcatgcccgagatcgaaaccgagcaagagtacaaagagattttcatcacgccccaccagatcaagcacattaaggacttcaaggactacaagtacagccaccgcgtggacaagaagcccaatagagagctgattaacgacaccctgtactctacccggaaggacgacaagggcaataccctgatcgtcaacaacctgaacggcctgtacgacaaggacaacgacaagctcaagaagctgatcaacaagagccccgagaaactgctgatgtaccaccacgatcctcagacctaccagaaactgaagctcatcatggaacagtacggcgacgagaagaatcccctgtacaagtactacgaggaaaccgggaactacctgaccaagtactccaaaaaggacaatgggcccgtgatcaagaagattaagtattacggcaacaagctgaatgcccacctggacatcaccgacgactaccccaacagcagaaacaaggtggtcaagctgtccctgaagccttacagattcgacgtgtacctggacaacggcgtgtacaagttcgtgaccgtgaagaacctggacgtcatcaaaaaagaaaactactacgaagtcaacagcaagtgctatgaggaagccaagaaactcaagaaaatcagcaaccaggccgagtttatcgcctccttctacaacaacgatctgatcaagatcaacggggagctgtatagagtgatcggcgtgaacaatgacctgctgaaccggatcgaagtgaacatgatcgacatcacctaccgcgagtacctcgagaacatgaacgataagcggcctccacggatcattaagacaatcgccagcaagacgcagagcattaagaagtacagcacagacatcctgggcaacctgtacgaagtgaagtctaagaagcacccgcagattatcaagaaaggcagcggcgctcccaagaaaaaacggaaggttggctccggagagggcagaggaagtctgctaacatgcggtgacgtcgaggagaatcctggcccaatggagagcgacgagagcggcctgcccgccatggagatcgagtgccgcatcaccggcaccctgaacggcgtggagttcgagctggtgggcggcggagagggcacccccgagcagggccgcatgaccaacaagatgaagagcaccaaaggcgccctgaccttcagcccctacctgctgagccacgtgatgggctacggcttctaccacttcggcacctaccccagcggctacgagaaccccttcctgcacgccatcaacaacggcggctacaccaacacccgcatcgagaagtacgaggacggcggcgtgctgcacgtgagcttcagctaccgctacgaggccggccgcgtgatcggcgacttcaaggtgatgggcaccggcttccccgaggacagcgtgatcttcaccgacaagatcatccgcagcaacgccaccgtggagcacctgcaccccatgggcgataacgatctggatggcagcttcacccgcaccttcagcctgcgcgacggcggctactacagctccgtggtggacagccacatgcacttcaagagcgccatccaccccagcatcctgcagaacgggggccccatgttcgccttccgccgcgtggaggaggatcacagcaacaccgagctgggcatcgtggagtaccagcacgccttcaagaccccggatgcagatgccggtgaagaataagagctcgctgatcagcctcgataagatacattgatgagtttggacaaaccacaactagaatgcagtgaaaaaaatgctttatttgtgaaatttgtgatgctattgctttatttgtaaccattataagctgcaataaacaagttttaattaaggtcgggcaggaagagggcctatttcccatgattccttcatatttgcatatacgatacaaggctgttagagagataattagaattaatttgactgtaaacacaaagatattagtacaaaatacgtgacgtagaaagtaataatttcttgggtagtttgcagttttaaaattatgttttaaaatggactatcatatgcttaccgtaacttgaaagtatttcgatttcttggctttatatatcttgtggaaaggacgaaacaccgaagccgaaaaccacgatcatcgtttaagtactctgtgctggaaacagcacagaatctacttaaacaaggcaaaatgccgtgtttatctcgtcaacttgttggcgagattttttctaaagcttgaattcagctgacgtgcctcggaccgctaggaacccctagtgatggagttggccactccctctctgcgcgctcgctcgctcactgaggccgggcgaccaaaggtcgcccgacgcccgggctttgcccgggcggcctcagtgagcgagcgagcgcgcag

SEQ ID NO: 282 - DNA, 5388 bp, synthetic construct
  misc_feature 1..5388: note = Description of Artificial Sequence: Syntheticpolynucleotide
  source 1..5388: mol_type = other DNA
ctgcgcgctcgctcgctcactgaggccgcccgggcgtcgggcgacctttggtcgcccggcctcagtgagcgagcgagcgcgcagagagggagtggccaactccatcactaggggttcctgcggccgcacgcgtctagatcccatatatggagttccgcgttacataacttacggtaaatggcccgcctggctgaccgcccaacgacccccgcccattgacgtcaataatgacgtatgttcccatagtaacgccaatagggactttccattgacgtcaatgggtggagtatttacggtaaactgcccacttggcagtacatcaagtgtatcatatgccaagtacgccccctattgacgtcaatgacggtaaatggcccgcctggcattatgcccagtacatgaccttatgggactttcctacttggcagtacatctacgtattagtcatcgctattaccatggtgatgcggttttggcagtacatcaatgggcgtggatagcggtttgactcacggggatttccaagtctccaccccattgacgtcaatgggagtttgttttggcaccaaaatcaacgggactttccaaaatgtcgtaacaactccgccccattgacgcaaatgggcggtaggcgtgtacggtgggaggtctatataagcagagctcgtttagtgaaccgtcagatcgcctggagacgcaccggtgccaccatggcccctaagaagaagcggaaagtcggcagcggcaagcggaactatatcctgggcctcgccatcggcatcaccagcgttggctacggcatcatcgactacgagacacgggacgtgatcgatgccggcgtgcggctgtttaaagaggccaacgtcgagaacaacgagggccgcagatctaagagaggcgccagacggctgaagcggagaagaaggcacagaatccagagagtgaagaagctgctgttcgactacaacctgctgaccgaccacagcgagctgagcggcatcaatccttacgaggccagagtgaagggcctgagccagaagctgagcgaggaagagtttagcgccgctctgctgcacctggccaagagaagaggcgtgcacaacgtgaacgaggtggaagaggacaccggcaacgagctgtccaccaaagagcagatcagccggaacagcaaggccctggaagagaaatacgtggccgaactgcagctggaacggctgaaaaaggatggcgaagtgcggggcagcatcaatcggttcaagaccagcgactacgtgaaagaagccaaacagctgctgaaggtgcagaaggcctaccaccagctggaccagagcttcatcgacacctacatcgacctgctggaaacccggcggacctactatgaaggacctggcgagggaagccccttcggctggaaggacatcaaagaatggtacgagatgctgatgggccactgcacctactttcccgaggaactgcggagcgtgaagtacgcctacaacgccgacctgtacaacgccctgaacgacctgaacaacctcgtgatcacccgggacgagaacgagaagctggaatattacgagaagttccagatcatcgagaacgtgttcaagcagaagaagaaacccacgctgaagcagatcgccaaagagatcctggtcaacgaggaagatatcaagggctacagagtgaccagcaccggcaagcccgagttcaccaacctgaaggtgtaccacgacatcaaggatatcacagcccggaaagagattattgagaacgccgagctgctggaccaaatcgccaagatcctgaccatctaccagagcagcgaggacatccaagaggaactgaccaatctgaactccgagctgacccaagaagagatcgagcagatctctaatctgaaggggtacaccggcacacacaacctgagcctgaaggccatcaacctgatcctggacgagctgtggcacaccaacgacaaccagattgccatcttcaacaggctgaagctggtgcccaagaaggtggacctgtctcagcagaaagaaatccccaccacactggtggacgacttcattctgagccccgtggtcaagaggagcttcatccagagcatcaaagtgatcaacgccatcatcaagaagtacgggctgcccaacgatatcatcatcgagctggcccgcgagaagaactccaaggacgcccagaaaatgatcaacgagatgcagaagaggaaccgccagaccaacgagcggatcgaggaaatcatccggaccaccggcaaagagaacgccaagtacctgatcgagaagatcaagctgcacgacatgcaagagggcaagtgcctgtacagcctggaagccattcctctggaagatctgctgaacaatcccttcaactatgaggtggaccacatcatccccagaagcgtgtccttcgacaacagcttcaacaacaaggtgctcgtgaagcaagaggaagccagcaagaagggcaacagaaccccattccagtacctgagcagcagcgacagcaagatcagctacgaaaccttcaagaagcacatcctgaatctggccaaaggcaagggcagaatcagcaagaccaagaaagaatacctgctcgaggaacgggacatcaacagattcagcgtgcagaaagacttcatcaatcggaacctggtggacaccagatacgccaccagaggcctgatgaatctgctgcggagctacttcagagtgaacaatctggacgtgaaagtcaagtccatcaacggcggcttcaccagctttctgcggcggaagtggaagttcaagaaagagcggaacaagggctataagcaccacgccgaggacgccctgatcattgccaacgccgatttcatcttcaaagagtggaagaaactggacaaggccaaaaaagtgatggaaaaccagatgttcgaggaaaagcaggccgagagcatgcccgagatcgaaaccgagcaagagtacaaagagattttcatcacgccccaccagatcaagcacattaaggacttcaaggactacaagtacagccaccgcgtggacaagaagcccaatagagagctgattaacgacaccctgtactctacccggaaggacgacaagggcaataccctgatcgtcaacaacctgaacggcctgtacgacaaggacaacgacaagctcaagaagctgatcaacaagagccccgagaaactgctgatgtaccaccacgatcctcagacctaccagaaactgaagctcatcatggaacagtacggcgacgagaagaatcccctgtacaagtactacgaggaaaccgggaactacctgaccaagtactccaaaaaggacaatgggcccgtgatcaagaagattaagtattacggcaacaagctgaatgcccacctggacatcaccgacgactaccccaacagcagaaacaaggtggtcaagctgtccctgaagccttacagattcgacgtgtacctggacaacggcgtgtacaagttcgtgaccgtgaagaacctggacgtcatcaaaaaagaaaactactacgaagtcaacagcaagtgctatgaggaagccaagaaactcaagaaaatcagcaaccaggccgagtttatcgcctccttctacaacaacgatctgatcaagatcaacggggagctgtatagagtgatcggcgtgaacaatgacctgctgaaccggatcgaagtgaacatgatcgacatcacctaccgcgagtacctcgagaacatgaacgataagcggcctccacggatcattaagacaatcgccagcaagacgcagagcattaagaagtacagcacagacatcctgggcaacctgtacgaagtgaagtctaagaagcacccgcagattatcaagaaaggcagcggcgctcccaagaaaaaacggaaggttggctccggagagggcagaggaagtctgctaacatgcggtgacgtcgaggagaatcctggcccaatggagagcgacgagagcggcctgcccgccatggagatcgagtgccgcatcaccggcaccctgaacggcgtggagttcgagctggtgggcggcggagagggcacccccgagcagggccgcatgaccaacaagatgaagagcaccaaaggcgccctgaccttcagcccctacctgctgagccacgtgatgggctacggcttctaccacttcggcacctaccccagcggctacgagaaccccttcctgcacgccatcaacaacggcggctacaccaacacccgcatcgagaagtacgaggacggcggcgtgctgcacgtgagcttcagctaccgctacgaggccggccgcgtgatcggcgacttcaaggtgatgggcaccggcttccccgaggacagcgtgatcttcaccgacaagatcatccgcagcaacgccaccgtggagcacctgcaccccatgggcgataacgatctggatggcagcttcacccgcaccttcagcctgcgcgacggcggctactacagctccgtggtggacagccacatgcacttcaagagcgccatccaccccagcatcctgcagaacgggggccccatgttcgccttccgccgcgtggaggaggatcacagcaacaccgagctgggcatcgtggagtaccagcacgccttcaagaccccggatgcagatgccggtgaagaataagagctcgctgatcagcctcgataagatacattgatgagtttggacaaaccacaactagaatgcagtgaaaaaaatgctttatttgtgaaatttgtgatgctattgctttatttgtaaccattataagctgcaataaacaagttttaattaaggtcgggcaggaagagggcctatttcccatgattccttcatatttgcatatacgatacaaggctgttagagagataattagaattaatttgactgtaaacacaaagatattagtacaaaatacgtgacgtagaaagtaataatttcttgggtagtttgcagttttaaaattatgttttaaaatggactatcatatgcttaccgtaacttgaaagtatttcgatttcttggctttatatatcttgtggaaaggacgaaacaccgaagccgaaaaccacgatcatcgtttaagtactctgtgctggaaacagcacagaatctacttaaacaaggcaaaatgccgtgtttatctcgtcaacttgttggcgagattttttctaaagcttgaattcagctgacgtgcctcggaccgctaggaacccctagtgatggagttggccactccctctctgcgcgctcgctcgctcactgaggccgggcgaccaaaggtcgcccgacgcccgggctttgcccgggcggcctcagtgagcgagcgagcgcgcag

SEQ ID NO: 283 - DNA, 5388 bp, synthetic construct
  misc_feature 1..5388: note = Description of Artificial Sequence: Syntheticpolynucleotide
  source 1..5388: mol_type = other DNA
ctgcgcgctcgctcgctcactgaggccgcccgggcgtcgggcgacctttggtcgcccggcctcagtgagcgagcgagcgcgcagagagggagtggccaactccatcactaggggttcctgcggccgcacgcgtctagatcccatatatggagttccgcgttacataacttacggtaaatggcccgcctggctgaccgcccaacgacccccgcccattgacgtcaataatgacgtatgttcccatagtaacgccaatagggactttccattgacgtcaatgggtggagtatttacggtaaactgcccacttggcagtacatcaagtgtatcatatgccaagtacgccccctattgacgtcaatgacggtaaatggcccgcctggcattatgcccagtacatgaccttatgggactttcctacttggcagtacatctacgtattagtcatcgctattaccatggtgatgcggttttggcagtacatcaatgggcgtggatagcggtttgactcacggggatttccaagtctccaccccattgacgtcaatgggagtttgttttggcaccaaaatcaacgggactttccaaaatgtcgtaacaactccgccccattgacgcaaatgggcggtaggcgtgtacggtgggaggtctatataagcagagctcgtttagtgaaccgtcagatcgcctggagacgcaccggtgccaccatggcccctaagaagaagcggaaagtcggcagcggcaagcggaactatatcctgggcctcgacatcggcatcaccagcgttggctacggcatcatcgactacgagacacgggacgtgatcgatgccggcgtgcggctgtttaaagaggccaacgtcgagaacaacgagggccgcagatctaagagaggcgccagacggctgaagcggagaagaaggcacagaatccagagagtgaagaagctgctgttcgactacaacctgctgaccgaccacagcgagctgagcggcatcaatccttacgaggccagagtgaagggcctgagccagaagctgagcgaggaagagtttagcgccgctctgctgcacctggccaagagaagaggcgtgcacaacgtgaacgaggtggaagaggacaccggcaacgagctgtccaccaaagagcagatcagccggaacagcaaggccctggaagagaaatacgtggccgaactgcagctggaacggctgaaaaaggatggcgaagtgcggggcagcatcaatcggttcaagaccagcgactacgtgaaagaagccaaacagctgctgaaggtgcagaaggcctaccaccagctggaccagagcttcatcgacacctacatcgacctgctggaaacccggcggacctactatgaaggacctggcgagggaagccccttcggctggaaggacatcaaagaatggtacgagatgctgatgggccactgcacctactttcccgaggaactgcggagcgtgaagtacgcctacaacgccgacctgtacaacgccctgaacgacctgaacaacctcgtgatcacccgggacgagaacgagaagctggaatattacgagaagttccagatcatcgagaacgtgttcaagcagaagaagaaacccacgctgaagcagatcgccaaagagatcctggtcaacgaggaagatatcaagggctacagagtgaccagcaccggcaagcccgagttcaccaacctgaaggtgtaccacgacatcaaggatatcacagcccggaaagagattattgagaacgccgagctgctggaccaaatcgccaagatcctgaccatctaccagagcagcgaggacatccaagaggaactgaccaatctgaactccgagctgacccaagaagagatcgagcagatctctaatctgaaggggtacaccggcacacacaacctgagcctgaaggccatcaacctgatcctggacgagctgtggcacaccaacgacaaccagattgccatcttcaacaggctgaagctggtgcccaagaaggtggacctgtctcagcagaaagaaatccccaccacactggtggacgacttcattctgagccccgtggtcaagaggagcttcatccagagcatcaaagtgatcaacgccatcatcaagaagtacgggctgcccaacgatatcatcatcgagctggcccgcgagaagaactccaaggacgcccagaaaatgatcaacgagatgcagaagaggaaccgccagaccaacgagcggatcgaggaaatcatccggaccaccggcaaagagaacgccaagtacctgatcgagaagatcaagctgcacgacatgcaagagggcaagtgcctgtacagcctggaagccattcctctggaagatctgctgaacaatcccttcaactatgaggtggaccacatcatccccagaagcgtgtccttcgacaacagcttcaacaacaaggtgctcgtgaagcaagaggaaaacagcaagaagggcaacagaaccccattccagtacctgagcagcagcgacagcaagatcagctacgaaaccttcaagaagcacatcctgaatctggccaaaggcaagggcagaatcagcaagaccaagaaagaatacctgctcgaggaacgggacatcaacagattcagcgtgcagaaagacttcatcaatcggaacctggtggacaccagatacgccaccagaggcctgatgaatctgctgcggagctacttcagagtgaacaatctggacgtgaaagtcaagtccatcaacggcggcttcaccagctttctgcggcggaagtggaagttcaagaaagagcggaacaagggctataagcaccacgccgaggacgccctgatcattgccaacgccgatttcatcttcaaagagtggaagaaactggacaaggccaaaaaagtgatggaaaaccagatgttcgaggaaaagcaggccgagagcatgcccgagatcgaaaccgagcaagagtacaaagagattttcatcacgccccaccagatcaagcacattaaggacttcaaggactacaagtacagccaccgcgtggacaagaagcccaatagagagctgattaacgacaccctgtactctacccggaaggacgacaagggcaataccctgatcgtcaacaacctgaacggcctgtacgacaaggacaacgacaagctcaagaagctgatcaacaagagccccgagaaactgctgatgtaccaccacgatcctcagacctaccagaaactgaagctcatcatggaacagtacggcgacgagaagaatcccctgtacaagtactacgaggaaaccgggaactacctgaccaagtactccaaaaaggacaatgggcccgtgatcaagaagattaagtattacggcaacaagctgaatgcccacctggacatcaccgacgactaccccaacagcagaaacaaggtggtcaagctgtccctgaagccttacagattcgacgtgtacctggacaacggcgtgtacaagttcgtgaccgtgaagaacctggacgtcatcaaaaaagaaaactactacgaagtcaacagcaagtgctatgaggaagccaagaaactcaagaaaatcagcaaccaggccgagtttatcgcctccttctacaacaacgatctgatcaagatcaacggggagctgtatagagtgatcggcgtgaacaatgacctgctgaaccggatcgaagtgaacatgatcgacatcacctaccgcgagtacctcgagaacatgaacgataagcggcctccacggatcattaagacaatcgccagcaagacgcagagcattaagaagtacagcacagacatcctgggcaacctgtacgaagtgaagtctaagaagcacccgcagattatcaagaaaggcagcggcgctcccaagaaaaaacggaaggttggctccggagagggcagaggaagtctgctaacatgcggtgacgtcgaggagaatcctggcccaatggagagcgacgagagcggcctgcccgccatggagatcgagtgccgcatcaccggcaccctgaacggcgtggagttcgagctggtgggcggcggagagggcacccccgagcagggccgcatgaccaacaagatgaagagcaccaaaggcgccctgaccttcagcccctacctgctgagccacgtgatgggctacggcttctaccacttcggcacctaccccagcggctacgagaaccccttcctgcacgccatcaacaacggcggctacaccaacacccgcatcgagaagtacgaggacggcggcgtgctgcacgtgagcttcagctaccgctacgaggccggccgcgtgatcggcgacttcaaggtgatgggcaccggcttccccgaggacagcgtgatcttcaccgacaagatcatccgcagcaacgccaccgtggagcacctgcaccccatgggcgataacgatctggatggcagcttcacccgcaccttcagcctgcgcgacggcggctactacagctccgtggtggacagccacatgcacttcaagagcgccatccaccccagcatcctgcagaacgggggccccatgttcgccttccgccgcgtggaggaggatcacagcaacaccgagctgggcatcgtggagtaccagcacgccttcaagaccccggatgcagatgccggtgaagaataagagctcgctgatcagcctcgataagatacattgatgagtttggacaaaccacaactagaatgcagtgaaaaaaatgctttatttgtgaaatttgtgatgctattgctttatttgtaaccattataagctgcaataaacaagttttaattaaggtcgggcaggaagagggcctatttcccatgattccttcatatttgcatatacgatacaaggctgttagagagataattagaattaatttgactgtaaacacaaagatattagtacaaaatacgtgacgtagaaagtaataatttcttgggtagtttgcagttttaaaattatgttttaaaatggactatcatatgcttaccgtaacttgaaagtatttcgatttcttggctttatatatcttgtggaaaggacgaaacaccgaggagcaccaggaacttgccagtttaagtactctgtgctggaaacagcacagaatctacttaaacaaggcaaaatgccgtgtttatctcgtcaacttgttggcgagattttttctaaagcttgaattcagctgacgtgcctcggaccgctaggaacccctagtgatggagttggccactccctctctgcgcgctcgctcgctcactgaggccgggcgaccaaaggtcgcccgacgcccgggctttgcccgggcggcctcagtgagcgagcgagcgcgcag

SEQ ID NO: 284 - DNA, 5388 bp, synthetic construct
  misc_feature 1..5388: note = Description of Artificial Sequence: Syntheticpolynucleotide
  source 1..5388: mol_type = other DNA
ctgcgcgctcgctcgctcactgaggccgcccgggcgtcgggcgacctttggtcgcccggcctcagtgagcgagcgagcgcgcagagagggagtggccaactccatcactaggggttcctgcggccgcacgcgtctagatcccatatatggagttccgcgttacataacttacggtaaatggcccgcctggctgaccgcccaacgacccccgcccattgacgtcaataatgacgtatgttcccatagtaacgccaatagggactttccattgacgtcaatgggtggagtatttacggtaaactgcccacttggcagtacatcaagtgtatcatatgccaagtacgccccctattgacgtcaatgacggtaaatggcccgcctggcattatgcccagtacatgaccttatgggactttcctacttggcagtacatctacgtattagtcatcgctattaccatggtgatgcggttttggcagtacatcaatgggcgtggatagcggtttgactcacggggatttccaagtctccaccccattgacgtcaatgggagtttgttttggcaccaaaatcaacgggactttccaaaatgtcgtaacaactccgccccattgacgcaaatgggcggtaggcgtgtacggtgggaggtctatataagcagagctcgtttagtgaaccgtcagatcgcctggagacgcaccggtgccaccatggcccctaagaagaagcggaaagtcggcagcggcaagcggaactatatcctgggcctcgccatcggcatcaccagcgttggctacggcatcatcgactacgagacacgggacgtgatcgatgccggcgtgcggctgtttaaagaggccaacgtcgagaacaacgagggccgcagatctaagagaggcgccagacggctgaagcggagaagaaggcacagaatccagagagtgaagaagctgctgttcgactacaacctgctgaccgaccacagcgagctgagcggcatcaatccttacgaggccagagtgaagggcctgagccagaagctgagcgaggaagagtttagcgccgctctgctgcacctggccaagagaagaggcgtgcacaacgtgaacgaggtggaagaggacaccggcaacgagctgtccaccaaagagcagatcagccggaacagcaaggccctggaagagaaatacgtggccgaactgcagctggaacggctgaaaaaggatggcgaagtgcggggcagcatcaatcggttcaagaccagcgactacgtgaaagaagccaaacagctgctgaaggtgcagaaggcctaccaccagctggaccagagcttcatcgacacctacatcgacctgctggaaacccggcggacctactatgaaggacctggcgagggaagccccttcggctggaaggacatcaaagaatggtacgagatgctgatgggccactgcacctactttcccgaggaactgcggagcgtgaagtacgcctacaacgccgacctgtacaacgccctgaacgacctgaacaacctcgtgatcacccgggacgagaacgagaagctggaatattacgagaagttccagatcatcgagaacgtgttcaagcagaagaagaaacccacgctgaagcagatcgccaaagagatcctggtcaacgaggaagatatcaagggctacagagtgaccagcaccggcaagcccgagttcaccaacctgaaggtgtaccacgacatcaaggatatcacagcccggaaagagattattgagaacgccgagctgctggaccaaatcgccaagatcctgaccatctaccagagcagcgaggacatccaagaggaactgaccaatctgaactccgagctgacccaagaagagatcgagcagatctctaatctgaaggggtacaccggcacacacaacctgagcctgaaggccatcaacctgatcctggacgagctgtggcacaccaacgacaaccagattgccatcttcaacaggctgaagctggtgcccaagaaggtggacctgtctcagcagaaagaaatccccaccacactggtggacgacttcattctgagccccgtggtcaagaggagcttcatccagagcatcaaagtgatcaacgccatcatcaagaagtacgggctgcccaacgatatcatcatcgagctggcccgcgagaagaactccaaggacgcccagaaaatgatcaacgagatgcagaagaggaaccgccagaccaacgagcggatcgaggaaatcatccggaccaccggcaaagagaacgccaagtacctgatcgagaagatcaagctgcacgacatgcaagagggcaagtgcctgtacagcctggaagccattcctctggaagatctgctgaacaatcccttcaactatgaggtggaccacatcatccccagaagcgtgtccttcgacaacagcttcaacaacaaggtgctcgtgaagcaagaggaagccagcaagaagggcaacagaaccccattccagtacctgagcagcagcgacagcaagatcagctacgaaaccttcaagaagcacatcctgaatctggccaaaggcaagggcagaatcagcaagaccaagaaagaatacctgctcgaggaacgggacatcaacagattcagcgtgcagaaagacttcatcaatcggaacctggtggacaccagatacgccaccagaggcctgatgaatctgctgcggagctacttcagagtgaacaatctggacgtgaaagtcaagtccatcaacggcggcttcaccagctttctgcggcggaagtggaagttcaagaaagagcggaacaagggctataagcaccacgccgaggacgccctgatcattgccaacgccgatttcatcttcaaagagtggaagaaactggacaaggccaaaaaagtgatggaaaaccagatgttcgaggaaaagcaggccgagagcatgcccgagatcgaaaccgagcaagagtacaaagagattttcatcacgccccaccagatcaagcacattaaggacttcaaggactacaagtacagccaccgcgtggacaagaagcccaatagagagctgattaacgacaccctgtactctacccggaaggacgacaagggcaataccctgatcgtcaacaacctgaacggcctgtacgacaaggacaacgacaagctcaagaagctgatcaacaagagccccgagaaactgctgatgtaccaccacgatcctcagacctaccagaaactgaagctcatcatggaacagtacggcgacgagaagaatcccctgtacaagtactacgaggaaaccgggaactacctgaccaagtactccaaaaaggacaatgggcccgtgatcaagaagattaagtattacggcaacaagctgaatgcccacctggacatcaccgacgactaccccaacagcagaaacaaggtggtcaagctgtccctgaagccttacagattcgacgtgtacctggacaacggcgtgtacaagttcgtgaccgtgaagaacctggacgtcatcaaaaaagaaaactactacgaagtcaacagcaagtgctatgaggaagccaagaaactcaagaaaatcagcaaccaggccgagtttatcgcctccttctacaacaacgatctgatcaagatcaacggggagctgtatagagtgatcggcgtgaacaatgacctgctgaaccggatcgaagtgaacatgatcgacatcacctaccgcgagtacctcgagaacatgaacgataagcggcctccacggatcattaagacaatcgccagcaagacgcagagcattaagaagtacagcacagacatcctgggcaacctgtacgaagtgaagtctaagaagcacccgcagattatcaagaaaggcagcggcgctcccaagaaaaaacggaaggttggctccggagagggcagaggaagtctgctaacatgcggtgacgtcgaggagaatcctggcccaatggagagcgacgagagcggcctgcccgccatggagatcgagtgccgcatcaccggcaccctgaacggcgtggagttcgagctggtgggcggcggagagggcacccccgagcagggccgcatgaccaacaagatgaagagcaccaaaggcgccctgaccttcagcccctacctgctgagccacgtgatgggctacggcttctaccacttcggcacctaccccagcggctacgagaaccccttcctgcacgccatcaacaacggcggctacaccaacacccgcatcgagaagtacgaggacggcggcgtgctgcacgtgagcttcagctaccgctacgaggccggccgcgtgatcggcgacttcaaggtgatgggcaccggcttccccgaggacagcgtgatcttcaccgacaagatcatccgcagcaacgccaccgtggagcacctgcaccccatgggcgataacgatctggatggcagcttcacccgcaccttcagcctgcgcgacggcggctactacagctccgtggtggacagccacatgcacttcaagagcgccatccaccccagcatcctgcagaacgggggccccatgttcgccttccgccgcgtggaggaggatcacagcaacaccgagctgggcatcgtggagtaccagcacgccttcaagaccccggatgcagatgccggtgaagaataagagctcgctgatcagcctcgataagatacattgatgagtttggacaaaccacaactagaatgcagtgaaaaaaatgctttatttgtgaaatttgtgatgctattgctttatttgtaaccattataagctgcaataaacaagttttaattaaggtcgggcaggaagagggcctatttcccatgattccttcatatttgcatatacgatacaaggctgttagagagataattagaattaatttgactgtaaacacaaagatattagtacaaaatacgtgacgtagaaagtaataatttcttgggtagtttgcagttttaaaattatgttttaaaatggactatcatatgcttaccgtaacttgaaagtatttcgatttcttggctttatatatcttgtggaaaggacgaaacaccgaggagcaccaggaacttgccagtttaagtactctgtgctggaaacagcacagaatctacttaaacaaggcaaaatgccgtgtttatctcgtcaacttgttggcgagattttttctaaagcttgaattcagctgacgtgcctcggaccgctaggaacccctagtgatggagttggccactccctctctgcgcgctcgctcgctcactgaggccgggcgaccaaaggtcgcccgacgcccgggctttgcccgggcggcctcagtgagcgagcgagcgcgcag

SEQ ID NO: 285 - DNA, 5388 bp, synthetic construct
  misc_feature 1..5388: note = Description of Artificial Sequence: Syntheticpolynucleotide
  source 1..5388: mol_type = other DNA
ctgcgcgctcgctcgctcactgaggccgcccgggcgtcgggcgacctttggtcgcccggcctcagtgagcgagcgagcgcgcagagagggagtggccaactccatcactaggggttcctgcggccgcacgcgtctagatcccatatatggagttccgcgttacataacttacggtaaatggcccgcctggctgaccgcccaacgacccccgcccattgacgtcaataatgacgtatgttcccatagtaacgccaatagggactttccattgacgtcaatgggtggagtatttacggtaaactgcccacttggcagtacatcaagtgtatcatatgccaagtacgccccctattgacgtcaatgacggtaaatggcccgcctggcattatgcccagtacatgaccttatgggactttcctacttggcagtacatctacgtattagtcatcgctattaccatggtgatgcggttttggcagtacatcaatgggcgtggatagcggtttgactcacggggatttccaagtctccaccccattgacgtcaatgggagtttgttttggcaccaaaatcaacgggactttccaaaatgtcgtaacaactccgccccattgacgcaaatgggcggtaggcgtgtacggtgggaggtctatataagcagagctcgtttagtgaaccgtcagatcgcctggagacgcaccggtgccaccatggcccctaagaagaagcggaaagtcggcagcggcaagcggaactatatcctgggcctcgacatcggcatcaccagcgttggctacggcatcatcgactacgagacacgggacgtgatcgatgccggcgtgcggctgtttaaagaggccaacgtcgagaacaacgagggccgcagatctaagagaggcgccagacggctgaagcggagaagaaggcacagaatccagagagtgaagaagctgctgttcgactacaacctgctgaccgaccacagcgagctgagcggcatcaatccttacgaggccagagtgaagggcctgagccagaagctgagcgaggaagagtttagcgccgctctgctgcacctggccaagagaagaggcgtgcacaacgtgaacgaggtggaagaggacaccggcaacgagctgtccaccaaagagcagatcagccggaacagcaaggccctggaagagaaatacgtggccgaactgcagctggaacggctgaaaaaggatggcgaagtgcggggcagcatcaatcggttcaagaccagcgactacgtgaaagaagccaaacagctgctgaaggtgcagaaggcctaccaccagctggaccagagcttcatcgacacctacatcgacctgctggaaacccggcggacctactatgaaggacctggcgagggaagccccttcggctggaaggacatcaaagaatggtacgagatgctgatgggccactgcacctactttcccgaggaactgcggagcgtgaagtacgcctacaacgccgacctgtacaacgccctgaacgacctgaacaacctcgtgatcacccgggacgagaacgagaagctggaatattacgagaagttccagatcatcgagaacgtgttcaagcagaagaagaaacccacgctgaagcagatcgccaaagagatcctggtcaacgaggaagatatcaagggctacagagtgaccagcaccggcaagcccgagttcaccaacctgaaggtgtaccacgacatcaaggatatcacagcccggaaagagattattgagaacgccgagctgctggaccaaatcgccaagatcctgaccatctaccagagcagcgaggacatccaagaggaactgaccaatctgaactccgagctgacccaagaagagatcgagcagatctctaatctgaaggggtacaccggcacacacaacctgagcctgaaggccatcaacctgatcctggacgagctgtggcacaccaacgacaaccagattgccatcttcaacaggctgaagctggtgcccaagaaggtggacctgtctcagcagaaagaaatccccaccacactggtggacgacttcattctgagccccgtggtcaagaggagcttcatccagagcatcaaagtgatcaacgccatcatcaagaagtacgggctgcccaacgatatcatcatcgagctggcccgcgagaagaactccaaggacgcccagaaaatgatcaacgagatgcagaagaggaaccgccagaccaacgagcggatcgaggaaatcatccggaccaccggcaaagagaacgccaagtacctgatcgagaagatcaagctgcacgacatgcaagagggcaagtgcctgtacagcctggaagccattcctctggaagatctgctgaacaatcccttcaactatgaggtggaccacatcatccccagaagcgtgtccttcgacaacagcttcaacaacaaggtgctcgtgaagcaagaggaaaacagcaagaagggcaacagaaccccattccagtacctgagcagcagcgacagcaagatcagctacgaaaccttcaagaagcacatcctgaatctggccaaaggcaagggcagaatcagcaagaccaagaaagaatacctgctcgaggaacgggacatcaacagattcagcgtgcagaaagacttcatcaatcggaacctggtggacaccagatacgccaccagaggcctgatgaatctgctgcggagctacttcagagtgaacaatctggacgtgaaagtcaagtccatcaacggcggcttcaccagctttctgcggcggaagtggaagttcaagaaagagcggaacaagggctataagcaccacgccgaggacgccctgatcattgccaacgccgatttcatcttcaaagagtggaagaaactggacaaggccaaaaaagtgatggaaaaccagatgttcgaggaaaagcaggccgagagcatgcccgagatcgaaaccgagcaagagtacaaagagattttcatcacgccccaccagatcaagcacattaaggacttcaaggactacaagtacagccaccgcgtggacaagaagcccaatagagagctgattaacgacaccctgtactctacccggaaggacgacaagggcaataccctgatcgtcaacaacctgaacggcctgtacgacaaggacaacgacaagctcaagaagctgatcaacaagagccccgagaaactgctgatgtaccaccacgatcctcagacctaccagaaactgaagctcatcatggaacagtacggcgacgagaagaatcccctgtacaagtactacgaggaaaccgggaactacctgaccaagtactccaaaaaggacaatgggcccgtgatcaagaagattaagtattacggcaacaagctgaatgcccacctggacatcaccgacgactaccccaacagcagaaacaaggtggtcaagctgtccctgaagccttacagattcgacgtgtacctggacaacggcgtgtacaagttcgtgaccgtgaagaacctggacgtcatcaaaaaagaaaactactacgaagtcaacagcaagtgctatgaggaagccaagaaactcaagaaaatcagcaaccaggccgagtttatcgcctccttctacaacaacgatctgatcaagatcaacggggagctgtatagagtgatcggcgtgaacaatgacctgctgaaccggatcgaagtgaacatgatcgacatcacctaccgcgagtacctcgagaacatgaacgataagcggcctccacggatcattaagacaatcgccagcaagacgcagagcattaagaagtacagcacagacatcctgggcaacctgtacgaagtgaagtctaagaagcacccgcagattatcaagaaaggcagcggcgctcccaagaaaaaacggaaggttggctccggagagggcagaggaagtctgctaacatgcggtgacgtcgaggagaatcctggcccaatggagagcgacgagagcggcctgcccgccatggagatcgagtgccgcatcaccggcaccctgaacggcgtggagttcgagctggtgggcggcggagagggcacccccgagcagggccgcatgaccaacaagatgaagagcaccaaaggcgccctgaccttcagcccctacctgctgagccacgtgatgggctacggcttctaccacttcggcacctaccccagcggctacgagaaccccttcctgcacgccatcaacaacggcggctacaccaacacccgcatcgagaagtacgaggacggcggcgtgctgcacgtgagcttcagctaccgctacgaggccggccgcgtgatcggcgacttcaaggtgatgggcaccggcttccccgaggacagcgtgatcttcaccgacaagatcatccgcagcaacgccaccgtggagcacctgcaccccatgggcgataacgatctggatggcagcttcacccgcaccttcagcctgcgcgacggcggctactacagctccgtggtggacagccacatgcacttcaagagcgccatccaccccagcatcctgcagaacgggggccccatgttcgccttccgccgcgtggaggaggatcacagcaacaccgagctgggcatcgtggagtaccagcacgccttcaagaccccggatgcagatgccggtgaagaataagagctcgctgatcagcctcgataagatacattgatgagtttggacaaaccacaactagaatgcagtgaaaaaaatgctttatttgtgaaatttgtgatgctattgctttatttgtaaccattataagctgcaataaacaagttttaattaaggtcgggcaggaagagggcctatttcccatgattccttcatatttgcatatacgatacaaggctgttagagagataattagaattaatttgactgtaaacacaaagatattagtacaaaatacgtgacgtagaaagtaataatttcttgggtagtttgcagttttaaaattatgttttaaaatggactatcatatgcttaccgtaacttgaaagtatttcgatttcttggctttatatatcttgtggaaaggacgaaacaccggcgctaccgccgcctgcagaagtttaagtactctgtgctggaaacagcacagaatctacttaaacaaggcaaaatgccgtgtttatctcgtcaacttgttggcgagattttttctaaagcttgaattcagctgacgtgcctcggaccgctaggaacccctagtgatggagttggccactccctctctgcgcgctcgctcgctcactgaggccgggcgaccaaaggtcgcccgacgcccgggctttgcccgggcggcctcagtgagcgagcgagcgcgcag

SEQ ID NO: 286 - DNA, 5388 bp, synthetic construct
  misc_feature 1..5388: note = Description of Artificial Sequence: Syntheticpolynucleotide
  source 1..5388: mol_type = other DNA
ctgcgcgctcgctcgctcactgaggccgcccgggcgtcgggcgacctttggtcgcccggcctcagtgagcgagcgagcgcgcagagagggagtggccaactccatcactaggggttcctgcggccgcacgcgtctagatcccatatatggagttccgcgttacataacttacggtaaatggcccgcctggctgaccgcccaacgacccccgcccattgacgtcaataatgacgtatgttcccatagtaacgccaatagggactttccattgacgtcaatgggtggagtatttacggtaaactgcccacttggcagtacatcaagtgtatcatatgccaagtacgccccctattgacgtcaatgacggtaaatggcccgcctggcattatgcccagtacatgaccttatgggactttcctacttggcagtacatctacgtattagtcatcgctattaccatggtgatgcggttttggcagtacatcaatgggcgtggatagcggtttgactcacggggatttccaagtctccaccccattgacgtcaatgggagtttgttttggcaccaaaatcaacgggactttccaaaatgtcgtaacaactccgccccattgacgcaaatgggcggtaggcgtgtacggtgggaggtctatataagcagagctcgtttagtgaaccgtcagatcgcctggagacgcaccggtgccaccatggcccctaagaagaagcggaaagtcggcagcggcaagcggaactatatcctgggcctcgacatcggcatcaccagcgttggctacggcatcatcgactacgagacacgggacgtgatcgatgccggcgtgcggctgtttaaagaggccaacgtcgagaacaacgagggccgcagatctaagagaggcgccagacggctgaagcggagaagaaggcacagaatccagagagtgaagaagctgctgttcgactacaacctgctgaccgaccacagcgagctgagcggcatcaatccttacgaggccagagtgaagggcctgagccagaagctgagcgaggaagagtttagcgccgctctgctgcacctggccaagagaagaggcgtgcacaacgtgaacgaggtggaagaggacaccggcaacgagctgtccaccaaagagcagatcagccggaacagcaaggccctggaagagaaatacgtggccgaactgcagctggaacggctgaaaaaggatggcgaagtgcggggcagcatcaatcggttcaagaccagcgactacgtgaaagaagccaaacagctgctgaaggtgcagaaggcctaccaccagctggaccagagcttcatcgacacctacatcgacctgctggaaacccggcggacctactatgaaggacctggcgagggaagccccttcggctggaaggacatcaaagaatggtacgagatgctgatgggccactgcacctactttcccgaggaactgcggagcgtgaagtacgcctacaacgccgacctgtacaacgccctgaacgacctgaacaacctcgtgatcacccgggacgagaacgagaagctggaatattacgagaagttccagatcatcgagaacgtgttcaagcagaagaagaaacccacgctgaagcagatcgccaaagagatcctggtcaacgaggaagatatcaagggctacagagtgaccagcaccggcaagcccgagttcaccaacctgaaggtgtaccacgacatcaaggatatcacagcccggaaagagattattgagaacgccgagctgctggaccaaatcgccaagatcctgaccatctaccagagcagcgaggacatccaagaggaactgaccaatctgaactccgagctgacccaagaagagatcgagcagatctctaatctgaaggggtacaccggcacacacaacctgagcctgaaggccatcaacctgatcctggacgagctgtggcacaccaacgacaaccagattgccatcttcaacaggctgaagctggtgcccaagaaggtggacctgtctcagcagaaagaaatccccaccacactggtggacgacttcattctgagccccgtggtcaagaggagcttcatccagagcatcaaagtgatcaacgccatcatcaagaagtacgggctgcccaacgatatcatcatcgagctggcccgcgagaagaactccaaggacgcccagaaaatgatcaacgagatgcagaagaggaaccgccagaccaacgagcggatcgaggaaatcatccggaccaccggcaaagagaacgccaagtacctgatcgagaagatcaagctgcacgacatgcaagagggcaagtgcctgtacagcctggaagccattcctctggaagatctgctgaacaatcccttcaactatgaggtggaccacatcatccccagaagcgtgtccttcgacaacagcttcaacaacaaggtgctcgtgaagcaagaggaaaacagcaagaagggcaacagaaccccattccagtacctgagcagcagcgacagcaagatcagctacgaaaccttcaagaagcacatcctgaatctggccaaaggcaagggcagaatcagcaagaccaagaaagaatacctgctcgaggaacgggacatcaacagattcagcgtgcagaaagacttcatcaatcggaacctggtggacaccagatacgccaccagaggcctgatgaatctgctgcggagctacttcagagtgaacaatctggacgtgaaagtcaagtccatcaacggcggcttcaccagctttctgcggcggaagtggaagttcaagaaagagcggaacaagggctataagcaccacgccgaggacgccctgatcattgccaacgccgatttcatcttcaaagagtggaagaaactggacaaggccaaaaaagtgatggaaaaccagatgttcgaggaaaagcaggccgagagcatgcccgagatcgaaaccgagcaagagtacaaagagattttcatcacgccccaccagatcaagcacattaaggacttcaaggactacaagtacagccaccgcgtggacaagaagcccaatagagagctgattaacgacaccctgtactctacccggaaggacgacaagggcaataccctgatcgtcaacaacctgaacggcctgtacgacaaggacaacgacaagctcaagaagctgatcaacaagagccccgagaaactgctgatgtaccaccacgatcctcagacctaccagaaactgaagctcatcatggaacagtacggcgacgagaagaatcccctgtacaagtactacgaggaaaccgggaactacctgaccaagtactccaaaaaggacaatgggcccgtgatcaagaagattaagtattacggcaacaagctgaatgcccacctggacatcaccgacgactaccccaacagcagaaacaaggtggtcaagctgtccctgaagccttacagattcgacgtgtacctggacaacggcgtgtacaagttcgtgaccgtgaagaacctggacgtcatcaaaaaagaaaactactacgaagtcaacagcaagtgctatgaggaagccaagaaactcaagaaaatcagcaaccaggccgagtttatcgcctccttctacaacaacgatctgatcaagatcaacggggagctgtatagagtgatcggcgtgaacaatgacctgctgaaccggatcgaagtgaacatgatcgacatcacctaccgcgagtacctcgagaacatgaacgataagcggcctccacggatcattaagacaatcgccagcaagacgcagagcattaagaagtacagcacagacatcctgggcaacctgtacgaagtgaagtctaagaagcacccgcagattatcaagaaaggcagcggcgctcccaagaaaaaacggaaggttggctccggagagggcagaggaagtctgctaacatgcggtgacgtcgaggagaatcctggcccaatggagagcgacgagagcggcctgcccgccatggagatcgagtgccgcatcaccggcaccctgaacggcgtggagttcgagctggtgggcggcggagagggcacccccgagcagggccgcatgaccaacaagatgaagagcaccaaaggcgccctgaccttcagcccctacctgctgagccacgtgatgggctacggcttctaccacttcggcacctaccccagcggctacgagaaccccttcctgcacgccatcaacaacggcggctacaccaacacccgcatcgagaagtacgaggacggcggcgtgctgcacgtgagcttcagctaccgctacgaggccggccgcgtgatcggcgacttcaaggtgatgggcaccggcttccccgaggacagcgtgatcttcaccgacaagatcatccgcagcaacgccaccgtggagcacctgcaccccatgggcgataacgatctggatggcagcttcacccgcaccttcagcctgcgcgacggcggctactacagctccgtggtggacagccacatgcacttcaagagcgccatccaccccagcatcctgcagaacgggggccccatgttcgccttccgccgcgtggaggaggatcacagcaacaccgagctgggcatcgtggagtaccagcacgccttcaagaccccggatgcagatgccggtgaagaataagagctcgctgatcagcctcgataagatacattgatgagtttggacaaaccacaactagaatgcagtgaaaaaaatgctttatttgtgaaatttgtgatgctattgctttatttgtaaccattataagctgcaataaacaagttttaattaaggtcgggcaggaagagggcctatttcccatgattccttcatatttgcatatacgatacaaggctgttagagagataattagaattaatttgactgtaaacacaaagatattagtacaaaatacgtgacgtagaaagtaataatttcttgggtagtttgcagttttaaaattatgttttaaaatggactatcatatgcttaccgtaacttgaaagtatttcgatttcttggctttatatatcttgtggaaaggacgaaacaccgtttcggcttggagtacatcgtgtttaagtactctgtgctggaaacagcacagaatctacttaaacaaggcaaaatgccgtgtttatctcgtcaacttgttggcgagattttttctaaagcttgaattcagctgacgtgcctcggaccgctaggaacccctagtgatggagttggccactccctctctgcgcgctcgctcgctcactgaggccgggcgaccaaaggtcgcccgacgcccgggctttgcccgggcggcctcagtgagcgagcgagcgcgcag

SEQ ID NO: 287 - DNA, 5388 bp, synthetic construct
  misc_feature 1..5388: note = Description of Artificial Sequence: Syntheticpolynucleotide
  source 1..5388: mol_type = other DNA
ctgcgcgctcgctcgctcactgaggccgcccgggcgtcgggcgacctttggtcgcccggcctcagtgagcgagcgagcgcgcagagagggagtggccaactccatcactaggggttcctgcggccgcacgcgtctagatcccatatatggagttccgcgttacataacttacggtaaatggcccgcctggctgaccgcccaacgacccccgcccattgacgtcaataatgacgtatgttcccatagtaacgccaatagggactttccattgacgtcaatgggtggagtatttacggtaaactgcccacttggcagtacatcaagtgtatcatatgccaagtacgccccctattgacgtcaatgacggtaaatggcccgcctggcattatgcccagtacatgaccttatgggactttcctacttggcagtacatctacgtattagtcatcgctattaccatggtgatgcggttttggcagtacatcaatgggcgtggatagcggtttgactcacggggatttccaagtctccaccccattgacgtcaatgggagtttgttttggcaccaaaatcaacgggactttccaaaatgtcgtaacaactccgccccattgacgcaaatgggcggtaggcgtgtacggtgggaggtctatataagcagagctcgtttagtgaaccgtcagatcgcctggagacgcaccggtgccaccatggcccctaagaagaagcggaaagtcggcagcggcaagcggaactatatcctgggcctcgacatcggcatcaccagcgttggctacggcatcatcgactacgagacacgggacgtgatcgatgccggcgtgcggctgtttaaagaggccaacgtcgagaacaacgagggccgcagatctaagagaggcgccagacggctgaagcggagaagaaggcacagaatccagagagtgaagaagctgctgttcgactacaacctgctgaccgaccacagcgagctgagcggcatcaatccttacgaggccagagtgaagggcctgagccagaagctgagcgaggaagagtttagcgccgctctgctgcacctggccaagagaagaggcgtgcacaacgtgaacgaggtggaagaggacaccggcaacgagctgtccaccaaagagcagatcagccggaacagcaaggccctggaagagaaatacgtggccgaactgcagctggaacggctgaaaaaggatggcgaagtgcggggcagcatcaatcggttcaagaccagcgactacgtgaaagaagccaaacagctgctgaaggtgcagaaggcctaccaccagctggaccagagcttcatcgacacctacatcgacctgctggaaacccggcggacctactatgaaggacctggcgagggaagccccttcggctggaaggacatcaaagaatggtacgagatgctgatgggccactgcacctactttcccgaggaactgcggagcgtgaagtacgcctacaacgccgacctgtacaacgccctgaacgacctgaacaacctcgtgatcacccgggacgagaacgagaagctggaatattacgagaagttccagatcatcgagaacgtgttcaagcagaagaagaaacccacgctgaagcagatcgccaaagagatcctggtcaacgaggaagatatcaagggctacagagtgaccagcaccggcaagcccgagttcaccaacctgaaggtgtaccacgacatcaaggatatcacagcccggaaagagattattgagaacgccgagctgctggaccaaatcgccaagatcctgaccatctaccagagcagcgaggacatccaagaggaactgaccaatctgaactccgagctgacccaagaagagatcgagcagatctctaatctgaaggggtacaccggcacacacaacctgagcctgaaggccatcaacctgatcctggacgagctgtggcacaccaacgacaaccagattgccatcttcaacaggctgaagctggtgcccaagaaggtggacctgtctcagcagaaagaaatccccaccacactggtggacgacttcattctgagccccgtggtcaagaggagcttcatccagagcatcaaagtgatcaacgccatcatcaagaagtacgggctgcccaacgatatcatcatcgagctggcccgcgagaagaactccaaggacgcccagaaaatgatcaacgagatgcagaagaggaaccgccagaccaacgagcggatcgaggaaatcatccggaccaccggcaaagagaacgccaagtacctgatcgagaagatcaagctgcacgacatgcaagagggcaagtgcctgtacagcctggaagccattcctctggaagatctgctgaacaatcccttcaactatgaggtggaccacatcatccccagaagcgtgtccttcgacaacagcttcaacaacaaggtgctcgtgaagcaagaggaaaacagcaagaagggcaacagaaccccattccagtacctgagcagcagcgacagcaagatcagctacgaaaccttcaagaagcacatcctgaatctggccaaaggcaagggcagaatcagcaagaccaagaaagaatacctgctcgaggaacgggacatcaacagattcagcgtgcagaaagacttcatcaatcggaacctggtggacaccagatacgccaccagaggcctgatgaatctgctgcggagctacttcagagtgaacaatctggacgtgaaagtcaagtccatcaacggcggcttcaccagctttctgcggcggaagtggaagttcaagaaagagcggaacaagggctataagcaccacgccgaggacgccctgatcattgccaacgccgatttcatcttcaaagagtggaagaaactggacaaggccaaaaaagtgatggaaaaccagatgttcgaggaaaagcaggccgagagcatgcccgagatcgaaaccgagcaagagtacaaagagattttcatcacgccccaccagatcaagcacattaaggacttcaaggactacaagtacagccaccgcgtggacaagaagcccaatagagagctgattaacgacaccctgtactctacccggaaggacgacaagggcaataccctgatcgtcaacaacctgaacggcctgtacgacaaggacaacgacaagctcaagaagctgatcaacaagagccccgagaaactgctgatgtaccaccacgatcctcagacctaccagaaactgaagctcatcatggaacagtacggcgacgagaagaatcccctgtacaagtactacgaggaaaccgggaactacctgaccaagtactccaaaaaggacaatgggcccgtgatcaagaagattaagtattacggcaacaagctgaatgcccacctggacatcaccgacgactaccccaacagcagaaacaaggtggtcaagctgtccctgaagccttacagattcgacgtgtacctggacaacggcgtgtacaagttcgtgaccgtgaagaacctggacgtcatcaaaaaagaaaactactacgaagtcaacagcaagtgctatgaggaagccaagaaactcaagaaaatcagcaaccaggccgagtttatcgcctccttctacaacaacgatctgatcaagatcaacggggagctgtatagagtgatcggcgtgaacaatgacctgctgaaccggatcgaagtgaacatgatcgacatcacctaccgcgagtacctcgagaacatgaacgataagcggcctccacggatcattaagacaatcgccagcaagacgcagagcattaagaagtacagcacagacatcctgggcaacctgtacgaagtgaagtctaagaagcacccgcagattatcaagaaaggcagcggcgctcccaagaaaaaacggaaggttggctccggagagggcagaggaagtctgctaacatgcggtgacgtcgaggagaatcctggcccaatggagagcgacgagagcggcctgcccgccatggagatcgagtgccgcatcaccggcaccctgaacggcgtggagttcgagctggtgggcggcggagagggcacccccgagcagggccgcatgaccaacaagatgaagagcaccaaaggcgccctgaccttcagcccctacctgctgagccacgtgatgggctacggcttctaccacttcggcacctaccccagcggctacgagaaccccttcctgcacgccatcaacaacggcggctacaccaacacccgcatcgagaagtacgaggacggcggcgtgctgcacgtgagcttcagctaccgctacgaggccggccgcgtgatcggcgacttcaaggtgatgggcaccggcttccccgaggacagcgtgatcttcaccgacaagatcatccgcagcaacgccaccgtggagcacctgcaccccatgggcgataacgatctggatggcagcttcacccgcaccttcagcctgcgcgacggcggctactacagctccgtggtggacagccacatgcacttcaagagcgccatccaccccagcatcctgcagaacgggggccccatgttcgccttccgccgcgtggaggaggatcacagcaacaccgagctgggcatcgtggagtaccagcacgccttcaagaccccggatgcagatgccggtgaagaataagagctcgctgatcagcctcgataagatacattgatgagtttggacaaaccacaactagaatgcagtgaaaaaaatgctttatttgtgaaatttgtgatgctattgctttatttgtaaccattataagctgcaataaacaagttttaattaaggtcgggcaggaagagggcctatttcccatgattccttcatatttgcatatacgatacaaggctgttagagagataattagaattaatttgactgtaaacacaaagatattagtacaaaatacgtgacgtagaaagtaataatttcttgggtagtttgcagttttaaaattatgttttaaaatggactatcatatgcttaccgtaacttgaaagtatttcgatttcttggctttatatatcttgtggaaaggacgaaacaccgccggatgctgctgccgctaccgtttaagtactctgtgctggaaacagcacagaatctacttaaacaaggcaaaatgccgtgtttatctcgtcaacttgttggcgagattttttctaaagcttgaattcagctgacgtgcctcggaccgctaggaacccctagtgatggagttggccactccctctctgcgcgctcgctcgctcactgaggccgggcgaccaaaggtcgcccgacgcccgggctttgcccgggcggcctcagtgagcgagcgagcgcgcag

SEQ ID NO: 288 - DNA, 5388 bp, synthetic construct
  misc_feature 1..5388: note = Description of Artificial Sequence: Syntheticpolynucleotide
  source 1..5388: mol_type = other DNA
ctgcgcgctcgctcgctcactgaggccgcccgggcgtcgggcgacctttggtcgcccggcctcagtgagcgagcgagcgcgcagagagggagtggccaactccatcactaggggttcctgcggccgcacgcgtctagatcccatatatggagttccgcgttacataacttacggtaaatggcccgcctggctgaccgcccaacgacccccgcccattgacgtcaataatgacgtatgttcccatagtaacgccaatagggactttccattgacgtcaatgggtggagtatttacggtaaactgcccacttggcagtacatcaagtgtatcatatgccaagtacgccccctattgacgtcaatgacggtaaatggcccgcctggcattatgcccagtacatgaccttatgggactttcctacttggcagtacatctacgtattagtcatcgctattaccatggtgatgcggttttggcagtacatcaatgggcgtggatagcggtttgactcacggggatttccaagtctccaccccattgacgtcaatgggagtttgttttggcaccaaaatcaacgggactttccaaaatgtcgtaacaactccgccccattgacgcaaatgggcggtaggcgtgtacggtgggaggtctatataagcagagctcgtttagtgaaccgtcagatcgcctggagacgcaccggtgccaccatggcccctaagaagaagcggaaagtcggcagcggcaagcggaactatatcctgggcctcgacatcggcatcaccagcgttggctacggcatcatcgactacgagacacgggacgtgatcgatgccggcgtgcggctgtttaaagaggccaacgtcgagaacaacgagggccgcagatctaagagaggcgccagacggctgaagcggagaagaaggcacagaatccagagagtgaagaagctgctgttcgactacaacctgctgaccgaccacagcgagctgagcggcatcaatccttacgaggccagagtgaagggcctgagccagaagctgagcgaggaagagtttagcgccgctctgctgcacctggccaagagaagaggcgtgcacaacgtgaacgaggtggaagaggacaccggcaacgagctgtccaccaaagagcagatcagccggaacagcaaggccctggaagagaaatacgtggccgaactgcagctggaacggctgaaaaaggatggcgaagtgcggggcagcatcaatcggttcaagaccagcgactacgtgaaagaagccaaacagctgctgaaggtgcagaaggcctaccaccagctggaccagagcttcatcgacacctacatcgacctgctggaaacccggcggacctactatgaaggacctggcgagggaagccccttcggctggaaggacatcaaagaatggtacgagatgctgatgggccactgcacctactttcccgaggaactgcggagcgtgaagtacgcctacaacgccgacctgtacaacgccctgaacgacctgaacaacctcgtgatcacccgggacgagaacgagaagctggaatattacgagaagttccagatcatcgagaacgtgttcaagcagaagaagaaacccacgctgaagcagatcgccaaagagatcctggtcaacgaggaagatatcaagggctacagagtgaccagcaccggcaagcccgagttcaccaacctgaaggtgtaccacgacatcaaggatatcacagcccggaaagagattattgagaacgccgagctgctggaccaaatcgccaagatcctgaccatctaccagagcagcgaggacatccaagaggaactgaccaatctgaactccgagctgacccaagaagagatcgagcagatctctaatctgaaggggtacaccggcacacacaacctgagcctgaaggccatcaacctgatcctggacgagctgtggcacaccaacgacaaccagattgccatcttcaacaggctgaagctggtgcccaagaaggtggacctgtctcagcagaaagaaatccccaccacactggtggacgacttcattctgagccccgtggtcaagaggagcttcatccagagcatcaaagtgatcaacgccatcatcaagaagtacgggctgcccaacgatatcatcatcgagctggcccgcgagaagaactccaaggacgcccagaaaatgatcaacgagatgcagaagaggaaccgccagaccaacgagcggatcgaggaaatcatccggaccaccggcaaagagaacgccaagtacctgatcgagaagatcaagctgcacgacatgcaagagggcaagtgcctgtacagcctggaagccattcctctggaagatctgctgaacaatcccttcaactatgaggtggaccacatcatccccagaagcgtgtccttcgacaacagcttcaacaacaaggtgctcgtgaagcaagaggaaaacagcaagaagggcaacagaaccccattccagtacctgagcagcagcgacagcaagatcagctacgaaaccttcaagaagcacatcctgaatctggccaaaggcaagggcagaatcagcaagaccaagaaagaatacctgctcgaggaacgggacatcaacagattcagcgtgcagaaagacttcatcaatcggaacctggtggacaccagatacgccaccagaggcctgatgaatctgctgcggagctacttcagagtgaacaatctggacgtgaaagtcaagtccatcaacggcggcttcaccagctttctgcggcggaagtggaagttcaagaaagagcggaacaagggctataagcaccacgccgaggacgccctgatcattgccaacgccgatttcatcttcaaagagtggaagaaactggacaaggccaaaaaagtgatggaaaaccagatgttcgaggaaaagcaggccgagagcatgcccgagatcgaaaccgagcaagagtacaaagagattttcatcacgccccaccagatcaagcacattaaggacttcaaggactacaagtacagccaccgcgtggacaagaagcccaatagagagctgattaacgacaccctgtactctacccggaaggacgacaagggcaataccctgatcgtcaacaacctgaacggcctgtacgacaaggacaacgacaagctcaagaagctgatcaacaagagccccgagaaactgctgatgtaccaccacgatcctcagacctaccagaaactgaagctcatcatggaacagtacggcgacgagaagaatcccctgtacaagtactacgaggaaaccgggaactacctgaccaagtactccaaaaaggacaatgggcccgtgatcaagaagattaagtattacggcaacaagctgaatgcccacctggacatcaccgacgactaccccaacagcagaaacaaggtggtcaagctgtccctgaagccttacagattcgacgtgtacctggacaacggcgtgtacaagttcgtgaccgtgaagaacctggacgtcatcaaaaaagaaaactactacgaagtcaacagcaagtgctatgaggaagccaagaaactcaagaaaatcagcaaccaggccgagtttatcgcctccttctacaacaacgatctgatcaagatcaacggggagctgtatagagtgatcggcgtgaacaatgacctgctgaaccggatcgaagtgaacatgatcgacatcacctaccgcgagtacctcgagaacatgaacgataagcggcctccacggatcattaagacaatcgccagcaagacgcagagcattaagaagtacagcacagacatcctgggcaacctgtacgaagtgaagtctaagaagcacccgcagattatcaagaaaggcagcggcgctcccaagaaaaaacggaaggttggctccggagagggcagaggaagtctgctaacatgcggtgacgtcgaggagaatcctggcccaatggagagcgacgagagcggcctgcccgccatggagatcgagtgccgcatcaccggcaccctgaacggcgtggagttcgagctggtgggcggcggagagggcacccccgagcagggccgcatgaccaacaagatgaagagcaccaaaggcgccctgaccttcagcccctacctgctgagccacgtgatgggctacggcttctaccacttcggcacctaccccagcggctacgagaaccccttcctgcacgccatcaacaacggcggctacaccaacacccgcatcgagaagtacgaggacggcggcgtgctgcacgtgagcttcagctaccgctacgaggccggccgcgtgatcggcgacttcaaggtgatgggcaccggcttccccgaggacagcgtgatcttcaccgacaagatcatccgcagcaacgccaccgtggagcacctgcaccccatgggcgataacgatctggatggcagcttcacccgcaccttcagcctgcgcgacggcggctactacagctccgtggtggacagccacatgcacttcaagagcgccatccaccccagcatcctgcagaacgggggccccatgttcgccttccgccgcgtggaggaggatcacagcaacaccgagctgggcatcgtggagtaccagcacgccttcaagaccccggatgcagatgccggtgaagaataagagctcgctgatcagcctcgataagatacattgatgagtttggacaaaccacaactagaatgcagtgaaaaaaatgctttatttgtgaaatttgtgatgctattgctttatttgtaaccattataagctgcaataaacaagttttaattaaggtcgggcaggaagagggcctatttcccatgattccttcatatttgcatatacgatacaaggctgttagagagataattagaattaatttgactgtaaacacaaagatattagtacaaaatacgtgacgtagaaagtaataatttcttgggtagtttgcagttttaaaattatgttttaaaatggactatcatatgcttaccgtaacttgaaagtatttcgatttcttggctttatatatcttgtggaaaggacgaaacaccgtgctgccgctaccgaggatgggtttaagtactctgtgctggaaacagcacagaatctacttaaacaaggcaaaatgccgtgtttatctcgtcaacttgttggcgagattttttctaaagcttgaattcagctgacgtgcctcggaccgctaggaacccctagtgatggagttggccactccctctctgcgcgctcgctcgctcactgaggccgggcgaccaaaggtcgcccgacgcccgggctttgcccgggcggcctcagtgagcgagcgagcgcgcag

SEQ ID NO: 289 - DNA, 2260 bp, synthetic construct
  misc_feature 1..2260: note = Description of Artificial Sequence: Syntheticpolynucleotide
  source 1..2260: mol_type = other DNA
ctgcgcgctcgctcgctcactgaggccgcccgggcgtcgggcgacctttggtcgcccggcctcagtgagcgagcgagcgcgcagagagggagtggccaactccatcactaggggttcctgcggccgcacgcgtctagatcccatatatggagttccgcgttacataacttacggtaaatggcccgcctggctgaccgcccaacgacccccgcccattgacgtcaataatgacgtatgttcccatagtaacgccaatagggactttccattgacgtcaatgggtggagtatttacggtaaactgcccacttggcagtacatcaagtgtatcatatgccaagtacgccccctattgacgtcaatgacggtaaatggcccgcctggcattatgcccagtacatgaccttatgggactttcctacttggcagtacatctacgtattagtcatcgctattaccatggtgatgcggttttggcagtacatcaatgggcgtggatagcggtttgactcacggggatttccaagtctccaccccattgacgtcaatgggagtttgttttggcaccaaaatcaacgggactttccaaaatgtcgtaacaactccgccccattgacgcaaatgggcggtaggcgtgtacggtgggaggtctatataagcagagctcgtttagtgaaccgtcgtttagtgaaccgtcagatcgcctggagacgcaccggtgccaccatggtgagcaagggcgaggagctgttcaccggggtggtgcccatcctggtcgagctggacggcgacgtaaacggccacaagttcagcgtgtccggcgagggcgagggcgatgccacctacggcaagctgaccctgaagttcatctgcaccaccggcaagctgcccgtgccctggcccaccctcgtgaccaccctgacctacggcgtgcagtgcttcagccgctaccccgaccacatgaagcagcacgacttcttcaagtccgccatgcccgaaggctacgtccaggagcgcaccatcttcttcaaggacgacggcaactacaagacccgcgccgaggtgaagttcgagggcgacaccctggtgaaccgcatcgagctgaagggcatcgacttcaaggaggacggcaacatcctggggcacaagctggagtacaactacaacagccacaacgtctatatcatggccgacaagcagaagaacggcatcaaggtgaacttcaagatccgccacaacatcgaggacggcagcgtgcagctcgccgaccactaccagcagaacacccccatcggcgacggccccgtgctgctgcccgacaaccactacctgagcacccagtccgccctgagcaaagaccccaacgagaagcgcgatcacatggtcctgctggagttcgtgaccgccgccgggatcactctcggcatggacgagctgtacaagtaataataagagctcgctgatcagcctcgactgtgccttctagttgccagccatctgttgtttgcccctcccccgtgccttccttgaccctggaaggtgccactcccactgtcctttcctaataaaatgaggaaattgcatcgcattgtctgagtaggtgtcattctattctggggggtggggtggggcaggacagcaagggggaggattgggaagacaatagcaggcatgctggggatgcggtgggctctatggttaattaaggtcgggcaggaagagggcctatttcccatgattccttcatatttgcatatacgatacaaggctgttagagagataattagaattaatttgactgtaaacacaaagatattagtacaaaatacgtgacgtagaaagtaataatttcttgggtagtttgcagttttaaaattatgttttaaaatggactatcatatgcttaccgtaacttgaaagtatttcgatttcttggctttatatatcttgtggaaaggacgaaacaccgaggagcaccaggaacttgccagtttaagtactctgtgctggaaacagcacagaatctacttaaacaaggcaaaatgccgtgtttatctcgtcaacttgttggcgagattttttctaaagcttgaattcaagcttgaattcagctgacgtgcctcggaccgctaggaacccctagtgatggagttggccactccctctctgcgcgctcgctcgctcactgaggccgggcgaccaaaggtcgcccgacgcccgggctttgcccgggcggcctcagtgagcgagcgagcgcgcag

SEQ ID NO: 290 - DNA, 2260 bp, synthetic construct
  misc_feature 1..2260: note = Description of Artificial Sequence: Syntheticpolynucleotide
  source 1..2260: mol_type = other DNA
ctgcgcgctcgctcgctcactgaggccgcccgggcgtcgggcgacctttggtcgcccggcctcagtgagcgagcgagcgcgcagagagggagtggccaactccatcactaggggttcctgcggccgcacgcgtctagatcccatatatggagttccgcgttacataacttacggtaaatggcccgcctggctgaccgcccaacgacccccgcccattgacgtcaataatgacgtatgttcccatagtaacgccaatagggactttccattgacgtcaatgggtggagtatttacggtaaactgcccacttggcagtacatcaagtgtatcatatgccaagtacgccccctattgacgtcaatgacggtaaatggcccgcctggcattatgcccagtacatgaccttatgggactttcctacttggcagtacatctacgtattagtcatcgctattaccatggtgatgcggttttggcagtacatcaatgggcgtggatagcggtttgactcacggggatttccaagtctccaccccattgacgtcaatgggagtttgttttggcaccaaaatcaacgggactttccaaaatgtcgtaacaactccgccccattgacgcaaatgggcggtaggcgtgtacggtgggaggtctatataagcagagctcgtttagtgaaccgtcgtttagtgaaccgtcagatcgcctggagacgcaccggtgccaccatggtgagcaagggcgaggagctgttcaccggggtggtgcccatcctggtcgagctggacggcgacgtaaacggccacaagttcagcgtgtccggcgagggcgagggcgatgccacctacggcaagctgaccctgaagttcatctgcaccaccggcaagctgcccgtgccctggcccaccctcgtgaccaccctgacctacggcgtgcagtgcttcagccgctaccccgaccacatgaagcagcacgacttcttcaagtccgccatgcccgaaggctacgtccaggagcgcaccatcttcttcaaggacgacggcaactacaagacccgcgccgaggtgaagttcgagggcgacaccctggtgaaccgcatcgagctgaagggcatcgacttcaaggaggacggcaacatcctggggcacaagctggagtacaactacaacagccacaacgtctatatcatggccgacaagcagaagaacggcatcaaggtgaacttcaagatccgccacaacatcgaggacggcagcgtgcagctcgccgaccactaccagcagaacacccccatcggcgacggccccgtgctgctgcccgacaaccactacctgagcacccagtccgccctgagcaaagaccccaacgagaagcgcgatcacatggtcctgctggagttcgtgaccgccgccgggatcactctcggcatggacgagctgtacaagtaataataagagctcgctgatcagcctcgactgtgccttctagttgccagccatctgttgtttgcccctcccccgtgccttccttgaccctggaaggtgccactcccactgtcctttcctaataaaatgaggaaattgcatcgcattgtctgagtaggtgtcattctattctggggggtggggtggggcaggacagcaagggggaggattgggaagacaatagcaggcatgctggggatgcggtgggctctatggttaattaaggtcgggcaggaagagggcctatttcccatgattccttcatatttgcatatacgatacaaggctgttagagagataattagaattaatttgactgtaaacacaaagatattagtacaaaatacgtgacgtagaaagtaataatttcttgggtagtttgcagttttaaaattatgttttaaaatggactatcatatgcttaccgtaacttgaaagtatttcgatttcttggctttatatatcttgtggaaaggacgaaacaccgaagccgaaaaccacgatcatcgtttaagtactctgtgctggaaacagcacagaatctacttaaacaaggcaaaatgccgtgtttatctcgtcaacttgttggcgagattttttctaaagcttgaattcaagcttgaattcagctgacgtgcctcggaccgctaggaacccctagtgatggagttggccactccctctctgcgcgctcgctcgctcactgaggccgggcgaccaaaggtcgcccgacgcccgggctttgcccgggcggcctcagtgagcgagcgagcgcgcag

SEQ ID NO: 291 - DNA, 2260 bp, synthetic construct
  misc_feature 1..2260: note = Description of Artificial Sequence: Syntheticpolynucleotide
  source 1..2260: mol_type = other DNA
ctgcgcgctcgctcgctcactgaggccgcccgggcgtcgggcgacctttggtcgcccggcctcagtgagcgagcgagcgcgcagagagggagtggccaactccatcactaggggttcctgcggccgcacgcgtctagatcccatatatggagttccgcgttacataacttacggtaaatggcccgcctggctgaccgcccaacgacccccgcccattgacgtcaataatgacgtatgttcccatagtaacgccaatagggactttccattgacgtcaatgggtggagtatttacggtaaactgcccacttggcagtacatcaagtgtatcatatgccaagtacgccccctattgacgtcaatgacggtaaatggcccgcctggcattatgcccagtacatgaccttatgggactttcctacttggcagtacatctacgtattagtcatcgctattaccatggtgatgcggttttggcagtacatcaatgggcgtggatagcggtttgactcacggggatttccaagtctccaccccattgacgtcaatgggagtttgttttggcaccaaaatcaacgggactttccaaaatgtcgtaacaactccgccccattgacgcaaatgggcggtaggcgtgtacggtgggaggtctatataagcagagctcgtttagtgaaccgtcgtttagtgaaccgtcagatcgcctggagacgcaccggtgccaccatggtgagcaagggcgaggagctgttcaccggggtggtgcccatcctggtcgagctggacggcgacgtaaacggccacaagttcagcgtgtccggcgagggcgagggcgatgccacctacggcaagctgaccctgaagttcatctgcaccaccggcaagctgcccgtgccctggcccaccctcgtgaccaccctgacctacggcgtgcagtgcttcagccgctaccccgaccacatgaagcagcacgacttcttcaagtccgccatgcccgaaggctacgtccaggagcgcaccatcttcttcaaggacgacggcaactacaagacccgcgccgaggtgaagttcgagggcgacaccctggtgaaccgcatcgagctgaagggcatcgacttcaaggaggacggcaacatcctggggcacaagctggagtacaactacaacagccacaacgtctatatcatggccgacaagcagaagaacggcatcaaggtgaacttcaagatccgccacaacatcgaggacggcagcgtgcagctcgccgaccactaccagcagaacacccccatcggcgacggccccgtgctgctgcccgacaaccactacctgagcacccagtccgccctgagcaaagaccccaacgagaagcgcgatcacatggtcctgctggagttcgtgaccgccgccgggatcactctcggcatggacgagctgtacaagtaataataagagctcgctgatcagcctcgactgtgccttctagttgccagccatctgttgtttgcccctcccccgtgccttccttgaccctggaaggtgccactcccactgtcctttcctaataaaatgaggaaattgcatcgcattgtctgagtaggtgtcattctattctggggggtggggtggggcaggacagcaagggggaggattgggaagacaatagcaggcatgctggggatgcggtgggctctatggttaattaaggtcgggcaggaagagggcctatttcccatgattccttcatatttgcatatacgatacaaggctgttagagagataattagaattaatttgactgtaaacacaaagatattagtacaaaatacgtgacgtagaaagtaataatttcttgggtagtttgcagttttaaaattatgttttaaaatggactatcatatgcttaccgtaacttgaaagtatttcgatttcttggctttatatatcttgtggaaaggacgaaacaccgaagccaaagaccacaatcatcgtttaagtactctgtgctggaaacagcacagaatctacttaaacaaggcaaaatgccgtgtttatctcgtcaacttgttggcgagattttttctaaagcttgaattcaagcttgaattcagctgacgtgcctcggaccgctaggaacccctagtgatggagttggccactccctctctgcgcgctcgctcgctcactgaggccgggcgaccaaaggtcgcccgacgcccgggctttgcccgggcggcctcagtgagcgagcgagcgcgcag

SEQ ID NO: 292 - DNA, 12 bp, synthetic construct
  misc_feature 1..12: note = Description of Artificial Sequence: Syntheticoligonucleotide
  source 1..12: mol_type = other DNA
aacgagcagtaa

SEQ ID NO: 293 - DNA, 31 bp, synthetic construct
  misc_feature 1..31: note = Description of Artificial Sequence: Syntheticoligonucleotide
  source 1..31: mol_type = other DNA
gtcatccgctccatcaggattctcaagttcc

SEQ ID NO: 294 - RNA, 31 nt, synthetic construct
  misc_feature 1..31: note = Description of Artificial Sequence: Syntheticoligonucleotide
  source 1..31: mol_type = other RNA
gtcatccgctccatcaggattctcaagttcc

SEQ ID NO: 295 - RNA, 21 nt, synthetic construct
  misc_feature 1..21: note = Description of Artificial Sequence: Syntheticoligonucleotide
  source 1..21: mol_type = other RNA
ttgagaatcctgatggagcgg

SEQ ID NO: 296 - DNA, 65 bp, synthetic construct
  misc_feature 1..65: note = Description of Artificial Sequence: Syntheticoligonucleotide
  source 1..65: mol_type = other DNA
ctgttgagaatcctgatggagcgggtttttgcctccaactgacccgctcataggattctcaacag

SEQ ID NO: 297 - DNA, 277 bp, synthetic construct; identical to SEQ ID NO: 101
  misc_feature 1..277: note = Description of Artificial Sequence: Syntheticpolynucleotide
  source 1..277: mol_type = other DNA

SEQ ID NO: 298 - DNA, 660 bp, synthetic construct
  misc_feature 1..660: note = Description of Artificial Sequence: Syntheticpolynucleotide
  source 1..660: mol_type = other DNA
gacattgattattgactagttattaatagtaatcaattacggggtcattagttcatagcccatatatggagttccgcgttacataacttacggtaaatggcccgcctggctgaccgcccaacgacccccgcccattgacgtcaataatgacgtatgttcccatagtaacgccaatagggactttccattgacgtcaatgggtggactatttacggtaaactgcccacttggcagtacatcaagtgtatcatatgccaagtacgccccctattgacgtcaatgacggtaaatggcccgcctggcattatgcccagtacatgaccttatgggactttcctacttggcagtacatctacgtattagtcatcgctattaccatgggtcgaggtgagccccacgttctgcttcactctccccatctcccccccctccccacccccaattttgtatttatttattttttaattattttgtgcagcgatgggggcggggggggggggggggcgcgcgccaggcggggcggggcggggcgaggggcggggcggggcgaggcggagaggtgcggcggcagccaatcagagcggcgcgctccgaaagtttccttttatggcgaggcggcggcggcggcggccctataaaaagcgaagcgcgcggcgggcg

SEQ ID NO: 299 - DNA, 658 bp, synthetic construct
  misc_feature 1..658: note = Description of Artificial Sequence: Syntheticpolynucleotide
  source 1..658: mol_type = other DNA
gacattgattattgactagttattaatagtaatcaattacggggtcattagttcatagcccatatatggagttccgcgttacataacttacggtaaatggcccgcctggctgaccgcccaacgacccccgcccattgacgtcaataatgacgtatgttcccatagtaacgccaatagggactttccattgacgtcaatgggtggactatttacggtaaactgcccacttggcagtacatcaagtgtatcatatgccaagtacgccccctattgacgtcaatgacggtaaatggcccgcctggcattatgcccagtacatgaccttatgggactttcctacttggcagtacatctacgtattagtcatcgctattaccatgggtcgaggtgagccccacgttctgcttcactctccccatctcccccccctccccacccccaattttgtatttatttattttttaattattttgtgcagcgatgggggcggggggggggggggcgcgcgccaggcggggcggggcggggcgaggggcggggcggggcgaggcggagaggtgcggcggcagccaatcagagcggcgcgctccgaaagtttccttttatggcgaggcggcggcggcggcggccctataaaaagcgaagcgcgcggcgggcg

SEQ ID NO: 300 - DNA, 1673 bp, synthetic construct
  misc_feature 1..1673: note = Description of Artificial Sequence: Syntheticpolynucleotide
  source 1..1673: mol_type = other DNA
gacattgattattgactagttattaatagtaatcaattacggggtcattagttcatagcccatatatggagttccgcgttacataacttacggtaaatggcccgcctggctgaccgcccaacgacccccgcccattgacgtcaataatgacgtatgttcccatagtaacgccaatagggactttccattgacgtcaatgggtggactatttacggtaaactgcccacttggcagtacatcaagtgtatcatatgccaagtacgccccctattgacgtcaatgacggtaaatggcccgcctggcattatgcccagtacatgaccttatgggactttcctacttggcagtacatctacgtattagtcatcgctattaccatgggtcgaggtgagccccacgttctgcttcactctccccatctcccccccctccccacccccaattttgtatttatttattttttaattattttgtgcagcgatgggggcggggggggggggggggcgcgcgccaggcggggcggggcggggcgaggggcggggcggggcgaggcggagaggtgcggcggcagccaatcagagcggcgcgctccgaaagtttccttttatggcgaggcggcggcggcggcggccctataaaaagcgaagcgcgcggcgggcgggagtcgctgcgttgccttcgccccgtgccccgctccgcgccgcctcgcgccgcccgccccggctctgactgaccgcgttactcccacaggtgagcgggcgggacggcccttctcctccgggctgtaattagcgcttggtttaatgacggctcgtttcttttctgtggctgcgtgaaagccttaaagggctccgggagggccctttgtgcgggggggagcggctcggggggtgcgtgcgtgtgtgtgtgcgtggggagcgccgcgtgcggcccgcgctgcccggcggctgtgagcgctgcgggcgcggcgcggggctttgtgcgctccgcgtgtgcgcgaggggagcgcggccgggggcggtgccccgcggtgcgggggggctgcgaggggaacaaaggctgcgtgcggggtgtgtgcgtgggggggtgagcagggggtgtgggcgcggcggtcgggctgtaacccccccctgcacccccctccccgagttgctgagcacggcccggcttcgggtgcggggctccgtgcggggcgtggcgcggggctcgccgtgccgggcggggggtggcggcaggtgggggtgccgggcggggcggggccgcctcgggccggggagggctcgggggaggggcgcggcggcccccggagcgccggcggctgtcgaggcgcggcgagccgcagccattgccttttatggtaatcgtgcgagagggcgcagggacttcctttgtcccaaatctgtgcggagccgaaatctgggaggcgccgccgcaccccctctagcgggcgcggggcgaagcggtgcggcgccggcaggaaggaaatgggcggggagggccttcgtgcgtcgccgcgccgccgtccccttctccctctccagcctcggggctgtccgcggggggacggctgccttcgggggggacggggcagggcggggttcggcttctggcgtgtgaccggcggctctagagcctctgctaaccatgttcatgccttcttctttttcctacag

SEQ ID NO: 301 - DNA, 1671 bp, synthetic construct
  misc_feature 1..1671: note = Description of Artificial Sequence: Syntheticpolynucleotide
  source 1..1671: mol_type = other DNA
gacattgattattgactagttattaatagtaatcaattacggggtcattagttcatagcccatatatggagttccgcgttacataacttacggtaaatggcccgcctggctgaccgcccaacgacccccgcccattgacgtcaataatgacgtatgttcccatagtaacgccaatagggactttccattgacgtcaatgggtggactatttacggtaaactgcccacttggcagtacatcaagtgtatcatatgccaagtacgccccctattgacgtcaatgacggtaaatggcccgcctggcattatgcccagtacatgaccttatgggactttcctacttggcagtacatctacgtattagtcatcgctattaccatgggtcgaggtgagccccacgttctgcttcactctccccatctcccccccctccccacccccaattttgtatttatttattttttaattattttgtgcagcgatgggggcggggggggggggggcgcgcgccaggcggggcggggcggggcgaggggcggggcggggcgaggcggagaggtgcggcggcagccaatcagagcggcgcgctccgaaagtttccttttatggcgaggcggcggcggcggcggccctataaaaagcgaagcgcgcggcgggcgggagtcgctgcgttgccttcgccccgtgccccgctccgcgccgcctcgcgccgcccgccccggctctgactgaccgcgttactcccacaggtgagcgggcgggacggcccttctcctccgggctgtaattagcgcttggtttaatgacggctcgtttcttttctgtggctgcgtgaaagccttaaagggctccgggagggccctttgtgcgggggggagcggctcggggggtgcgtgcgtgtgtgtgtgcgtggggagcgccgcgtgcggcccgcgctgcccggcggctgtgagcgctgcgggcgcggcgcggggctttgtgcgctccgcgtgtgcgcgaggggagcgcggccgggggcggtgccccgcggtgcgggggggctgcgaggggaacaaaggctgcgtgcggggtgtgtgcgtgggggggtgagcagggggtgtgggcgcggcggtcgggctgtaacccccccctgcacccccctccccgagttgctgagcacggcccggcttcgggtgcggggctccgtgcggggcgtggcgcggggctcgccgtgccgggcggggggtggcggcaggtgggggtgccgggcggggcggggccgcctcgggccggggagggctcgggggaggggcgcggcggcccccggagcgccggcggctgtcgaggcgcggcgagccgcagccattgccttttatggtaatcgtgcgagagggcgcagggacttcctttgtcccaaatctgtgcggagccgaaatctgggaggcgccgccgcaccccctctagcgggcgcggggcgaagcggtgcggcgccggcaggaaggaaatgggcggggagggccttcgtgcgtcgccgcgccgccgtccccttctccctctccagcctcggggctgtccgcggggggacggctgccttcgggggggacggggcagggcggggttcggcttctggcgtgtgaccggcggctctagagcctctgctaaccatgttcatgccttcttctttttcctacag

SEQ ID NO: 302 - DNA, 1725 bp, Homo sapiens
  source 1..1725: mol_type = other DNA
ctatggagtttgcataacaaacgtttggcagctcgctctcttacactccattaacaagctgtaacatatagctgcaggttgctataatctcattaatattttggaaacttgaatattgagtatttctgagtgctcattccccatatgccagccacttctgccatgctgactggttcctttctctccattattagcaattagcttcttaccttccaaagtcagatccaaggtatccaagatactagcaaaggaatcaactatgtgtgcaagttaagcatgcttaatatcacccaaacaaacaaagaggcagcatttcttaaagtaatgaagatagataaatcgggttagtcctttgcgacactgctggtgctttctagagttttatatattttaagcagcttgctttatattctgtctttgcctcccaccccaccagcacttttatttgtggagggttttggctcgccacactttgggaaacttatttgatttcacggagagctgaaggaagatcatttttggcaacagacaagtttaaacacgatttctatgggacattgctaactggggcccctaaggagaaaggggaaactgagcggagaatgggttaaatccttggaagcaggggagaggcaggggaggagagaagtcggaggagtataaagaaaaggacaggaaccaagaagcgtgggggtggtttgccgtaatgtgagtgtttcttaattagagaacggttgacaatagagggtctggcagaggctcctggccgcggtgcggagcgtctggagcggagcacgcgctgtcagctggtgagcgcactctcctttcaggcagctccccggggagctgtgcggccacatttaacaccatcatcacccctccccggcctcctcaacctcggcctcctcctcgtcgacagccttccttggcccccaccagcagagctcacagtagcgagcgtctctcgccgtctcccgcactcggccggggcctctctcctcccccagctgcgcagcgggagccgccactgcccactgcacctcccagcaaccagcccagcacgcaaagaagctgcgcaaagttaaagccaagcaatgccaaggggaggggaagctggaggcgggctttgagtggcttctgggcgcctggcgggtccagaatcgcccagagccgcccgcggtcgtgcacatctgacccgagtcagcttgggcaccagccgagagccggctccgcaccgctcccgcaccccagccgccggggtggtgacacacaccggagtcgaattacagccctgcaattaacatatgaatctgacgaatttaaaagaaggaaaaaaaaaaaaaaacctgagcaggcttgggagtcctctgcacacaagaacttttctcggggtgtaaaaactctttgattggctgctcgcacgcgcctgcccgcgccctccattggctgagaagacacgcgaccggcgcgaggagggggttgggagaggagcggggggagactgagtggcgcgtgccgctttttaaaggggcgcagcgccttcagcaaccggagaagcatagttgcacgcgacctggtgtgtgatctccgagtgggtgggggagggtcgaggagggaaaaaaaaataagacgttgcagaagagacccggaaagggccttttttttggttgagctggtgtcccagtgctgcctccgatcctgagcctccgagcctttgcagtgcaa

SEQ ID NO: 303 - DNA, 60 bp, Homo sapiens
  source 1..60: mol_type = other DNA
ctgccttctgagagcgctataaaggcagcggaagggtagtccgcggggcattccgggcgg

SEQ ID NO: 304 - DNA, 60 bp, Homo sapiens
  source 1..60: mol_type = other DNA
ctctaggcgggctctgctcttctttaaggagtcccacagggcctggcccgcccctgacct

SEQ ID NO: 305 - DNA, 2000 bp, Homo sapiens
  source 1..2000: mol_type = other DNA
taaagagttgtgagttgtgtaggtgagttgccatggagctacaaatatgagttgatattctgaaatcctagacagccatctccaaggttaagaaaaatccttatgcactcacttgcaaagatatccacagcatgctcttaatggagaaaaacaaagccttagatcaaatatgtaaagtaatttttagttttttgaaaaggtatgtttgggctatagataaatctgttcaaaaaacatgagagaagataataatggttgaaaggagacacagtgcttgccctcaagaagtttttgtctagtgagggagagagaacttgtatgtaaataaaattgtgttactaaggtagatagtgagaagtaacttaagagaggatcagataaggtattaagagaatacagaaaagggtctggattaattctgaacagcatcaaagaatgttcttgcaagagatagtgttttcaccagatcttgaaggtatggatgagggtatacagagtgagtatattcagattctactttaaaacaaatactttcctctgttgtagtggagttgagctatacatccaacaataatgaaaaaatacacgcatatatacatatatggagagagatacatattttagtacatgtagcaattgattaataaatgtacagtttaagtcgcatgcaaaaccttggagtgatagcaaacttcattgtaggatgtttagcagcatctctggtctctactcactagatcccaatagcatctccctaggtgtgacaaccaaaaatgtctccaggcattgacctctggaggcaaaaaaagccctttattaagaaccagtggtatacataagtaaaacatacacaagagattcctcccctcttctctgtatgtgaataaaaattgcaaagttcatgacctggattttccttttaggtttcttctttagtggttcttaacttcattgggtgaagtaagcctttgaagatctgttgaaagctgttgactcattcacttctcaggaaaacgcacatgctgactaccatttcagagaatttgcatcagggttctctggggaggagttctgagttctgtttccaggagctcgtagaattgtcatggtctgcatatgcaaggcaggtggattacggaaggttgatgtacagaggtctgtattttggagcctcttctgtatttacttcagaacactaacaatcaggcgagaatgttctggtttatcaaacccttccttctgcctttcatcttaaccatgcattagttttaacaaagttcatcccaacagaagacaaaacactgatgaggtaggatagctccagctcctcctccctctcttctagtcttgatttccatgtagtccagtttattccttccctgattgtccaggagaatgagaaaaagaaaaaacagagtctagtgggtaagaaagggccacctggacggcttgatttggattgtgaaataaaacacacacacatgcacacgtagaataagtggctaaaatctgagtaaatcgtgaactctctgtatcctccacccattgaatactcctaaaagactttctagaaattcaaggacttattaatatagaaacctggccattgttcctcttctcctccccatgtggtatgagagcacctgtggcaggctcccagagaccacggacctcttcctctaggcgggctctgctcttctttaaggagtcccacagggcctggcccgcccctgacctcgcaacccttgagattagtaacgggatgagtgaggatccgggtggcccctgcgtggcagccagtaagagtctcagccttcccggttcgggaaaggggaagaatgcaggaggggtaggatttctttcctgataggatcggttgggaaagaccgcagcctgtgtgtgtctttcccttcgaccaaggtgtctgttgctccgtaaataaaacgtcccactgccttctgagagcgctataaaggcagcggaagggtagtccgcggggc

SEQ ID NO: 306 - DNA, 1400 bp, Homo sapiens
  source 1..1400: mol_type = other DNA
ggctgctcggaaaacaggacgaggggagagacttgctcaataagctgaaagttctgcccccgagagggctgcgacagctgctggaatgtgcctgcagcgtccgcctcttggggacccgcggagcgcgccctgacggttccacgcctggcccgggggtctgcacctctcctccagtgcgcacctggagctgcgtcccgggtcaggtgcggggagggagggaatctcagtgtccccttccagccttgcaagcgcctttggcccctgccccagcccctcggtttgggggagatttcagaacgcggacagcgccctggctgcgggccataggggactgggtggaactcgggaagcccccagagcaggggcttactcgcttcaagtttggggaaccccgggcagcgggtgcaggccacgagacccgaaggttctcaggtgcccccctgcaggctggccgtgcgcgccgtggggcgcttgtcgcgagcgccgagggctgcaggacgcggaccagactcgcggtgcaggggggcctggctgcagctaacaggtgatcccgttctttctgttcctcgctcttcccctccgatcgtcctcgcttaccgcgtgtcctccctcctcgctgtcctctggctcgcaggtcatggcagcgccaggcggcaggtcggagccgccgcagctccccgagtacagctgcagctacatggtgtcgcggccggtctacagcgagctcgctttccagcaacagcacgagcggcgcctgcaggagcgcaagacgctgcgggagagcctggccaagtgctgcaggtagcggccgcgcgggcctgcgtagagagaagcggagcggggcgtccacgccttggggagggaagggcgtccccagcgggcgagagtggggtgcgggcggcggagcccctgggcgccagctgcttctcccagaggcccgactttcggtctccggtcctccacgccgcccttctggtgggagggtggctccatcagtctcgggcccgaaatgaacttacctgggaaactcgcctttggggagagtgggttctaggagccccgtctctctttttcctctctgaaggaaacttggagtgcctcttggggtacagtgggtccctgttgccttcttgggagcttgtttaaatgaaatgaatagggaaacccagctcttgaccaggaggagtccttgaaacactcaagctaagtaggcgggctaccattcagttagagaccaggatgcaagctagaacccaggggagcgcggggtgtgccaagtacttcatcagcaggctgtgggacccctggggaaagccaccctcagtctctaaacccaaacatgccgtaactagatgtcacaaacataaagaaattagagtttctaaaacctttcattatag

SEQ ID NO: 307 - DNA, 900 bp, Homo sapiens
  source 1..900: mol_type = other DNA
cggaaggttgatgtacagaggtctgtattttggagcctcttctgtatttacttcagaacactaacaatcaggcgagaatgttctggtttatcaaacccttccttctgcctttcatcttaaccatgcattagttttaacaaagttcatcccaacagaagacaaaacactgatgaggtaggatagctccagctcctcctccctctcttctagtcttgatttccatgtagtccagtttattccttccctgattgtccaggagaatgagaaaaagaaaaaacagagtctagtgggtaagaaagggccacctggacggcttgatttggattgtgaaataaaacacacacacatgcacacgtagaataagtggctaaaatctgagtaaatcgtgaactctctgtatcctccacccattgaatactcctaaaagactttctagaaattcaaggacttattaatatagaaacctggccattgttcctcttctcctccccatgtggtatgagagcacctgtggcaggctcccagagaccacggacctcttcctctaggcgggctctgctcttctttaaggagtcccacagggcctggcccgcccctgacctcgcaacccttgagattagtaacgggatgagtgaggatccgggtggcccctgcgtggcagccagtaagagtctcagccttcccggttcgggaaaggggaagaatgcaggaggggtaggatttctttcctgataggatcggttgggaaagaccgcagcctgtgtgtgtctttcccttcgaccaaggtgtctgttgctccgtaaataaaacgtcccactgccttctgagagcgctataaaggcagcggaagggtagtccgcggggcattccgggcggggcgcgagcagagacaggtgagtt

SEQ ID NO: 308 - DNA, 1269 bp, Homo sapiens
  source 1..1269: mol_type = other DNA
agggctatttgtacctcaacgagggcttctctccaagaaagccctgaatccttttcctcctttttcctgcagattcactataggacactttttgaagcaagagcatgcattttccccctggcgctctgcagcggttctcagagcccagtgtcactcacataggtgggactgctctcagttcagagagcgctgggacacttaagatgaaaagtccctggaagttagcaaacagccatctgtcactctggcatcgatttactaaaagtgacttctagggtattctaaaccacttttaaaaaacaaatgagtcacttcgacttcctcaccccgcaagagataggaaggcagcagtggagtgctcgctcaggagctgtatttgtttagcgattagcctagagctttgattttagggcaaaagcgagccagacagtgcggcagacgtaaggatcaaaaaggccacctatcattcgccggggacgcctgcctccttaccctgataacgtaactatttctctgcataggattttagtttttgtgtttttgttttgttttattctgtttaatcacttcaagtatctcatccattatttgaagcgggctcggaggaaacgtgccgcatcctccagtccttgtgcgtctgtttaggtctctccgaagcaggtccctctcgactcttagatctgggtctccagcacgcatgaaggggtaagggtgggggggtcccctattccggcgcgcggcgttgagcactgaatcttccaggcggaggctcagtgggagcgccgagaactcgccagtaccgcgcgctgcctgctgcctgctgcctcccagcccaggacttgggaaaggagggaggggacaagtggagggaaagtggggccgggcggggggtgcctgggaagccaggctgcgctgacgtcactgggcgcgcaattcgggctggagcgctttaaaaaacgagcgtgcaagcagagatgctgctccacaccgctcaggccgcgagcagcagcaaggcgcaccgccactgtcgccgctgcagccagggctgctccgaaggccggcgtggcggcaaccggcacctctgtccccgccgcgcttctcctcgccgcccacgccgtggggtcaggaacgcggcgtctggcgctgcagacgcccgctgagttgcagaagcccacggagcggcgcccggcgcgccacggcccgtagcagtccggtgctgctctccgcccgcgtccggctcgtggccccctacttcgggcaccgaccggt

SEQ ID NO: 309 - DNA, 463 bp, Homo sapiens
  source 1..463: mol_type = other DNA
tgcgtatgagtgcaagtgggttttaggaccaggatgaggcggggtgggggtgcctacctgacgaccgaccccgacccactggacaagcacccaacccccattccccaaattgcgcatcccctatcagagagggggaggggaaacaggatgcggcgaggcgcgtgcgcactgccagcttcagcaccgcggacagtgccttcgcccccgcctggcggcgcgcgccaccgccgcctcagcactgaaggcgcgctgacgtcactcgccggtcccccgcaaactccccttcccggccaccttggtcgcgtccgcgccgccgccggcccagccggaccgcaccacgcgaggcgcgagataggggggcacgggcgcgaccatctgcgctgcggcgccggcgactcagcgctgcctcagtctgcggtgggcagcggaggagtcgtgtcgtgcctgagagcgcagtcgagaa

SEQ ID NO: 310 - DNA, 2204 bp, Homo sapiens
  source 1..2204: mol_type = other DNA
cccacctccctctctgtgctgggactcacagagggagacctcaggaggcagtctgtccatcacatgtccaaatgcagagcataccctgggctgggcgcagtggcgcacaactgtaattccagcactttgggaggctgatgtggaaggatcacttgagcccagaagttctagaccagcctgggcaacatggcaagaccctatctctacaaaaaaagttaaaaaatcagccacgtgtggtgacacacacctgtagtcccagctattcaggaggctgaggtgaggggatcacttaaggctgggaggttgaggctgcagtgagtcgtggttgcgccactgcactccagcctgggcaacagtgagaccctgtctcaaaagacaaaaaaaaaaaaaaaaaaaaaaagaacatatcctggtgtggagtaggggacgctgctctgacagaggctcgggggcctgagctggctctgtgagctggggaggaggcagacagccaggccttgtctgcaagcagacctggcagcattgggctggccgccccccagggcctcctcttcatgcccagtgaatgactcaccttggcacagacacaatgttcggggtgggcacagtgcctgcttcccgccgcaccccagcccccctcaaatgccttccgagaagcccattgagcagggggcttgcattgcaccccagcctgacagcctggcatcttgggataaaagcagcacagccccctaggggctgcccttgctgtgtggcgccaccggcggtggagaacaaggctctattcagcctgtgcccaggaaaggggatcaggggatgcccaggcatggacagtgggtggcagggggggagaggagggctgtctgcttcccagaagtccaaggacacaaatgggtgaggggactgggcagggttctgaccctgtgggaccagagtggagggcgtagatggacctgaagtctccagggacaacagggcccaggtctcaggctcctagttgggcccagtggctccagcgtttccaaacccatccatccccagaggttcttcccatctctccaggctgatgtgtgggaactcgaggaaataaatctccagtgggagacggaggggtggccagggaaacggggcgctgcaggaataaagacgagccagcacagccagctcatgtgtaacggctttgtggagctgtcaaggcctggtctctgggagagaggcacagggaggccagacaaggaaggggtgacctggagggacagatccaggggctaaagtcctgataaggcaagagagtgccggccccctcttgccctatcaggacctccactgccacatagaggccatgattgacccttagacaaagggctggtgtccaatcccagcccccagccccagaactccagggaatgaatgggcagagagcaggaatgtgggacatctgtgttcaagggaaggactccaggagtctgctgggaatgaggcctagtaggaaatgaggtggcccttgagggtacagaacaggttcattcttcgccaaattcccagcaccttgcaggcacttacagctgagtgagataatgcctgggttatgaaatcaaaaagttggaaagcaggtcagaggtcatctggtacagcccttccttcccttttttttttttttttttgtgagacaaggtctctctctgttgcccaggctggagtggcgcaaacacagctcactgcagcctcaacctactgggctcaagcaatcctccagcctcagcctcccaaagtgctgggattacaagcatgagccaccccactcagccctttccttcctttttaattgatgcataataattgtaagtattcatcatggtccaaccaaccctttcttgacccaccttcctagagagagggtcctcttgcttcagcggtcagggccccagacccatggtctggctccaggtaccacctgcctcatgcaggagttggcgtgcccaggaagctctgcctctgggcacagtgacctcagtggggtgaggggagctctccccatagctgggctgcggcccaaccccaccccctcaggctatgccagggggtgttgccaggggcacccgggcatcgccagtctagcccactccttcataaagccctcgcatcccaggagcgagcagagccagagcaggttggagaggagacgcatcacctccgctgctcgc

SEQ ID NO: 311 - DNA, 119 bp, synthetic construct; identical to SEQ ID NO: 19
  misc_feature 1..119: note = Description of Artificial Sequence: Syntheticpolynucleotide
  source 1..119: mol_type = other DNA

SEQ ID NO: 312 - DNA, 130 bp, synthetic construct; identical to SEQ ID NO: 20
  misc_feature 1..130: note = Description of Artificial Sequence: Syntheticpolynucleotide
  source 1..130: mol_type = other DNA

SEQ ID NO: 313 - DNA, 141 bp, synthetic construct; identical to SEQ ID NO: 18
  misc_feature 1..141: note = Description of Artificial Sequence: Syntheticpolynucleotide
  source 1..141: mol_type = other DNA

SEQ ID NO: 314 - DNA, 264 bp, synthetic construct
  misc_feature 1..264: note = Description of Artificial Sequence: Syntheticpolynucleotide
  source 1..264: mol_type = other DNA
aaggtcgggcaggaagagggcctatttcccatgattccttcatatttgcatatacgatacaaggctgttagagagataattagaattaatttgactgtaaacacaaagatattagtacaaaatacgtgacgtagaaagtaataatttcttgggtagtttgcagttttaaaattatgttttaaaatggactatcatatgcttaccgtaacttgaaagtatttcgatttcttggctttatatatcttgtggaaaggacgaaacacc

SEQ ID NO: 315 - DNA, 276 bp, synthetic construct
  misc_feature 1..276: note = Description of Artificial Sequence: Syntheticpolynucleotide
  source 1..276: mol_type = other DNA
tcgaggtgagccccacgttctgcttcactctccccatctcccccccctccccacccccaattttgtatttatttattttttaattattttgtgcagcgatgggggcggggggggggggggcgcgcgccaggcggggcggggcggggcgaggggcggggcggggcgaggcggagaggtgcggcggcagccaatcagagcggcgcgctccgaaagtttccttttatggcgaggcggcggcggcggcggccctataaaaagcgaagcgcgcggcgggcg

SEQ ID NO: 316 - DNA, 740 bp, synthetic construct
  misc_feature 1..740: note = Description of Artificial Sequence: Syntheticpolynucleotide
  source 1..740: mol_type = other DNA
ttcagatgccatcattaatgagaactatgactacctgaaggggttcttggaagacctggcaaggaactccccttggattaattggcttctctgcttctttgtaggtggattgctcaggtaatgacctggagcagttacacatcaaagtgacttcactgtgcagtcggatagagcagattcagtgtctggtattggctttccctttgtatttttgaatagaatataccattcaaagcctcctcgctcttctactatagtggttttgtttttaaaccctgagtgacgcttcacctttctaaatcagattcccttttgtaaaggggataatgattgctgatgttacttcacacagggctattttcaagaggaatcaattgagtagcatgagtactattccagatcttattttgatctgtcaagctgaagatgtgagcaaattccaattaagattagaccaaagacttctgagactttcaggaattcagggatgagaaagcagagtgggtcagctctgttgtctggaacttccatttaacttagatgcctcaggataggggttactcagctggaatcccctccactactgactcactatgtgaacctgagtgagtcacaaaacatagttggacttccagcaaagaacacctgacctggtttccttaccagaggaatgtttcagaaagtgagtatgctatagaaatggttagctcttagcagtgttcggaattgtgggccaggag

SEQ ID NO: 317 - DNA, 918 bp, synthetic construct
  misc_feature 1..918: note = Description of Artificial Sequence: Syntheticpolynucleotide
  source 1..918: mol_type = other DNA
ccttgattcagagttaaagctatgggaaagtcctcaggcagaggacaaacattagacaagaaaatgcccatatatgaaaccctgcgaagcatcagtatttgaggagcagactaaaaaggaaccgtctgtggaggctaagagaagcatggccatttatctttgtgtcccgatcatcaggcacaggaccccacacacagtcacttctcaatgtgctaaatttcacagaatgcgtccagggtacctggttctggatagatccggtagaaggagatagaccgggagggcaaatggcatgaggagtctcacaggccagagtgattaaaggggtgtatcggggcggtaaaccctacagactctacctgtgcttatgcggggctggggaggacgagtcattacagatgaagaattaagtaaggtcagaccactcagggccttagatggatgtcacattgaagaatttagactccaacaggcctgccaccctgggaggagtcatcgcggattctggagaagggcgtgacagaggagatttcctttcgggaagtgtagtctggcagcggtgccccggtggtggcggcggcggtgctgctgttgctggtgatcgtgtggtggtgttagcggcgatagtgctttccactgggctttggcttggtagccgctgaaagagaacaacgctgccgctgctgctgatttcatgccatttcctgacccggcgctgtaacttggcctctgagccttggccacagaacgcagaggccgtggcatctggccgcagctgggctgcagtgcgtgcgcgcctggcctggtggtccgatgggaagcccggggcggggcagccgcggggcgggggcggggcgtcgcggagataggccacgcccctgcccgcccgcgcaggcgcgctgcgggtcgttagctgtc

SEQ ID NO: 318 - DNA, 1631 bp, synthetic construct
  misc_feature 1..1631: note = Description of Artificial Sequence: Syntheticpolynucleotide
  source 1..1631: mol_type = other DNA
tttctcctaattcagcacaaaaattgagttccttttctgtagctaaagagcttgtatgaactgtcagcttagctaaccatatgttttcaatgttccctgcaaattgtttaaggtatgtatagtcctttcaatggatgagtaagtcttttgtcattgttatttgctgcctgtggacttgatttcaaaatcttcttcaggtcatgaataaatttccttttccttctgtccctacttttgagccaaggaacaaatcaagattcttcctcagagtgtacacaccttcccaggcatctcactctctcctcactctatctgcttcaagttatggctcgttggtgagaacactctgctgctgaggttattatttagctataataactttttctaactagacagaaacaaattagatatgccaggattttctaattacctgccttaagtgcttttttagaaagcattaataaatcatgtggatcttttcctagcagtggtaagataagttataatattatcaaactgtcagttttgccacttcaatatatgtatgcctggttgtaacctcacttaataagttaagtccatgtaaaaatagttgatagttaataaattgggcaagagttgcttaaacagattagactatataacaaaattagggttttaaaagaataaagctgctataacagtacgcttcatctcacaggaattaatcagttatggtatctccacaaaacagaatatcacgtattgttgaagagagccgtctcatttccccggggttggtttaatttctaatcaaactctgaaggggcctttgggcttcagaaaatttaaaactatagaattaccttgttctttcctcgggccaattaactgggcagattctttgcattccatttgaagcttactagctcctgcattttagctaaagtttcgtttctcgctcagcagttgaaaacctatctccttgtgcagcagaaaccaagtatgaacctcaggcatattgagctgaacggcccttggcgccatccccaaacgctgatgtgcggaagatcccagtttcactcttctccctttcataagctctgaaaggaagtgtaggaagtatgccaagttgttattcaactctagtatttaatcaagcattacctgggcacttctgaaattctccagcttctaaagtgagagtaaaccagagagaacacagggtggaaactacttaatcgagaaggctcctaggataagtgaggatcacatggccattctcaggccccagttcctctccaaactcctgaaagtcagcaagaaaccgaatctcagtcatgatgattatttttcatgtaacacctcacagcgttctcagggatcccaatatatgctactaattcactttgtgttaagtaggagtttcttaaaaaaacaatttcagtggagaaattcctgctataccagatgactttgccaaaatctttgtcctttttttcacttagggtgaaaaaaaaaattgatgacccgtgttttgctaccactgacgagagtaataccttgtcccaaagctaaaacgatcaacctatgaaaactggagggttgggcttttgttgttgttgttaaaggcctgaatgaggtgatatctt

SEQ ID NO: 319 - DNA, 984 bp, synthetic construct
  misc_feature 1..984: note = Description of Artificial Sequence: Syntheticpolynucleotide
  source 1..984: mol_type = other DNA
gacccattattcaatgggagttgtcaggatgtcagcaatgtacaaaatcattgcttaatttgtttgacaatggaaatggccattatggtttttatgtaactttgcttctgttacataattcttgctgacacggtgtttcaaccaaggtacttggtagcaagtgttgtacagaaaaggatctgtaagtggtttatgtggtcatcaaccacagcaaagatttcatctgagctgtgctatgaagaatgtagcttgagaaacacaaaatgtatcactgggcaaaaaggaagcagaagaaaaatacagttctgctaatgagagctctgactggtatctggagtataagatgggcccagccaatgctgagtgaatgaatgaaatgccttttgcctacttcacaatgtcacctagggcacccggtgccaacttcacaatatcacccaaggcataacttttgactacttcacaatgtcacttttaactgaccccacacagaaatggggactccacagaaacgtaggagtgtgtctagtgtcagccccgtctgaatcactctcctgtggtggctccagccaacgaagaggaagcaaaaaggataaaaaatctgagctacagcgcatggatttaggttaaacagcctgggaatgaggggtacgctaatcgctgaggaaaacgcacctgtggaggcctctccagaaacagcagaggatccgagctgcgtgtaggcagggcgcgcatgtcaccctggcccgggcgcctggtccgctgctggagataaatggtcgaccccggagggagaggctagtaggggtgttgatgtgaactgattcgcccaagccttgggccgcaaaactgcgaaagaaagcggcaggcagcctctgcatttcccagaagtgcagctggggaactttcccagaccggcccaggggttgctagagggtcagacgtaaaggatccgcctttcctaggcggggtgggccccaggcc

SEQ ID NO: 320 - DNA, 1416 bp, synthetic construct
  misc_feature 1..1416: note = Description of Artificial Sequence: Syntheticpolynucleotide
  source 1..1416: mol_type = other DNA
ccaataaatgttggctcttgttttttctgacctgtatgttttgtctttgttccaaagctagccttacctctcccacatactggggttaattcatgctttggcccttatcaccttttccaatttatttcaaaattacatgctctattttaatatttgctttcttttttttattttgaaaacttattgaacttgcatctacactttaaaatgaagcagaacttaaagaactcaaagattatgaagaagactcagtacctgggaataaaattgagaataggttccttttatgactatataaccaatctcaaccattattttttgcttccccaaattaggagagtttaaaatgcagattctccccactctcctcttcccattcaatagaaactgagaaagaaggatcttattcaggtcttcactccatttgtgattcatattcagtggctgaaaggttagaaagcattcactccaccaataatgatcaagcacccataaagtaccaggagctcttacaaactctagggaaatcctggctcctgttgtcatgaattttgcattctcaggtaggaaatgtggctctgatgcctgctggggcagtgtacacttagagctacagaggatcttggaggtaatctaaaacctttctaaagagcaccctgcaatcacaccttctagcaacagccatttctcttgaattagtaaggtggctacaccgccaatttgagctgttctccttcagtcctgtagtccatcgccaggggagtctccaaatgctaataaaaatcaatttcccagacaaaagaacatagagggtcagggagcatctgacggacgtttttaaaggaaggggacagctacttccatgggactgcattttagttgtgctaaaagtgatgaaagtgggtttgcattattctaccaccaacacccaaaccacctgcccacggaaacccccgccggagaccgaagtttacccaaatagcgctcggcaaagcgctgccataaattcaaaactaactctgccgggcccgcgggggttgcgagacagggaccgaacgtgaaacccggggagccccgcgtctcttgcctccgaaggttttccgtgatcagtgtccccttctctgctggagtcggaagtgcctgtcacctgcggatctgcccgactctcccggtcggcccttcttctctgcccagttcggacagtctcgaattccccgtcgcagccccggccacctcggactccctggtccccagcccccgccccaccccccgcctccaccacgtcccctccccgcggtcccagcctctccaggcgctgctgggctctgattggcggctgcgctgacagcaggcggggcctggaagtcgcggccaagcccgccctcgcgtataagcccctctcagcgctctctctcc

SEQ ID NO: 321 - DNA, 1297 bp, synthetic construct
  misc_feature 1..1297: note = Description of Artificial Sequence: Syntheticpolynucleotide
  source 1..1297: mol_type = other DNA
ccttgaatatttatgtccattttaacacttcctggttgcaagagggatgtgcctccattatttcctccacagttttggtatttgtcagacatttgttctgctgtctttctaatccagccaacgtctgctcaggaagtggggccagctccactgggacccatagttttacttccttgtcatttgattggatagtttccaaggaagcccctccagattggcactatctcagaaaaggagagcttgttgtgaaacactgcttcctgaaacttcctgctattgcctaaagctacgtctgaaactgagtagggaaaggcatacttttccagggacttagggggataggctttgaggtctctcctcgtgttgactctatgcaatcttcatagcaccagttttacacattccttctctgaaattaaagccagatggagcctctaggcttagcaagtggctttagatagccaccagaggggacttgcaagctgtcctctatcctactcccaagatcagtctgccctttcccctaggaataggcaggaaaagaataaaggaaagaaaggactggcgagcaggtgagggtgggggcttgctctaccctcaacatttacacaccatgaggaagaggccccctacagcagagaagggcagatgacaggagcagccctcgagggcaccaccaatttcagtgatggaaaaactcccccatcccacccttagacctccagtctcccagccaagccctagctccgggcgagatgcgttctcttcagaaaaacgctgagaattctcagcttccagagacagcgagtccctcgtttcgggcgatgtccctggccacctggcggtgccatccctcccctgagactaagcgggatatgggacgtgtgcaggagccgggatatggggggccgggtcggtggtaacagggaaacggagactgctgtggagcagtaggcggagactagagctccggaaaaggtcgctacagggacgggggtgagagctgagagacaccgagtgaggagcacagagataacccgcctgatctcaaggcccagctttcgcgaggtgtggagcctgtagctaacctaggagtctccgtccgccagcaatgccgcaggactaaaaagatcccctcaaaaatctcttcattgagcccccacctcctcgagtcccgctccggccggtcgagcagccaatcgcctcgcggggcggggttgcggcgagctgccgtaaccaatagaggtggagggggcggggcctggctcccggcgcgcggcggtagggtcgcctccgg

SEQ ID NO: 322 - DNA, 1283 bp, synthetic construct
  misc_feature 1..1283: note = Description of Artificial Sequence: Syntheticpolynucleotide
  source 1..1283: mol_type = other DNA
aggcatgagccactatgcccaaatgagaaataattttgtatgaaaaataatcttgtatggtaaatttagaccaagaataaaatgagtggttgtataagaaagaaagatgttcagaacaaaccaaaaagtccaagcatgtcacgaatggtctgtgtaagtcataataaaaggatttatctaaaaaaaccaaaaacttttatatgatcaagtcgtctataattaaaggaaaattataatgggtttttctagacattgggtgtgatgtaatgaaacgtacacactaaagaattcattacaaggctttcatgttttgttttttgtttgtttgactggtttgttgttgttgttgttgttgttgttgttgtttttgagacggagtttcgctcttgttgcccaggctggagtacaatggcgcgatctaggctcaccacaacctctgcctcccgggttcaagcgattctcctgcatcatcctcccgagtagctgggatgacaggcatgcgccaccatgcccggctaattttgtatttttagtagagacgggggtttctcatgttggtcaggctagtctcgaactcccgacctccggtgatccgcccgcctcggcctcccaaagtgctgggattataggcgtgagccaccgcgcccagccgcgcccggtttttgttgttgtttttgtttctaaaaacagcgtctcgctctgtggcccaggcaggggtgcagtggcgcgatctcagctcactgcagcctggaactcctggggtcaagcggtcttcccacctaagcctctccgtgctgggactccggacgcgctccacctcacgcagccgtattcctgctttcaaagcagatggaagaggtgcgccaggacccccagttcttggaaacagacctctccagttacctgttgtttcctcttcacgaagagtgcatgtaacagtaagacacaactgtttcatattatacgtaaagagttcatgccaaaggttatagacagtcacatgctaaaactaggctacactttgaagaatcaccgctcaagttctggaaaaaagaggtgactgttgaacaacactgtgagggtaatcgatgccactgaaatatacacttaaattgattaaagtggcgaattttatctggcatatattaccaccatttttagaaatgttttttggcaggtgaagaaaagcaaggctccaggaggccctgcgcaccggtctacgcccactaactcacccgccccctgcgccgcgtctcccctctcaatttcagtcgcccattgat

SEQ ID NO: 323 - DNA, 1555 bp, synthetic construct
  misc_feature 1..1555: note = Description of Artificial Sequence: Syntheticpolynucleotide
  source 1..1555: mol_type = other DNA
agggcccatcctggtgtaaacaaaccctttggcgcagcccaagagagcccctatctaatacccagcacgatccccttacatccggagcactctttaaacatttttcctagctgatcttcacagtgaccctgcaggggagacaggaagaggtatcatgatccctgtgttagcgtgggagggctagtgaagtgcagtgacttgcccaaggtcactccatgaattgagggtggaattgaaaccaaaacactgatctcctgaccccctgtgcatacacagttgctcttggagattggagacccctggaatctggagcagacaatctggctggcttccttgcagctcaggtctgcggaggccacaagggggcagcatgcagccctcacctgtgtctctgggacctttgaagggagggtcctccctaggataacagtgagagctggaaactctaccctctccagagtattgcctcaagatccctgaacttagctccatgttttcagaatgtgctagctacaattcctgaaatgcccttttacttcccttttcacttattgagctcctatacatccatcaaggcccaatttaaatggccctttcagcagctatttctttggcaccttctgtgtgtcagacgttgttttaaacattgtgaatacagcttaaaacaagtctgacgggtggaaaggaaactgctgagggtggggtcaggggaacaggtgggagagggaccagtcccctccagcagaggggccaattgagggagcctgagacagctgtttgctcagaaaagtgtcttagtcactaaaggttgtggtggggaaagtccgtcctcccagtcatgtcctgggaatccggatggcgcaggaaggccacccggtgaccctaagagtggccacctgtcctctctgaactggactttctcttctggcccttcccctccctccctccctcactggcgctcagcagatcaatgctgcctttgctgacagctgagaatcgagctcgccttcccgccccttcccccgcccctcccgctcggcttcgtccctcgagatcctcccggaggaaccgggaagagtttgctgcggaaggctcaccctggggcagggcctgcggagggagcggctggtgtggccgcagctttccgtggaggaagagggaaagaggatcgggaaacccaagttaccaaccctgtgcaggggagatggaggtcggggactaagaaaaactgctgcccacccagccacacacagcactgggcacactttaagcacccgcaccaggcacacagtgctcgaccccaacggacacacctcatcctgccgcccgcggccacaactccacattcacttgcacgcgtccggcttcccggccccgcgcgctgcccccgccacgcggttcggcccaggcaccaactcggccgcccgtgcgccctgccccgccgcctgctccgcgcgttccctccctccgcctcgcctcgcttgctcgctcgctccctcccgatttgggaaggcggccgcggggcgggcgggggaggggcggggcgggggagggt

SEQ ID NO: 324 - DNA, 1214 bp, synthetic construct
  misc_feature 1..1214: note = Description of Artificial Sequence: Syntheticpolynucleotide
  source 1..1214: mol_type = other DNA
gtgaattcgatgatgtgcttgtgtggacatgtggaggtctcaagaacaaaagaagagctgggcctggcacacagtgggtgctaatgcctgttagaattgttgttgagagggcaggagggtgtaacatggacccagctatctgatcctgaggctgggcgccatgtgggtgtgaagtacaccaggggctccaaccagcaagtgctagctcaggttacagtcagctgcccctggaggaagctagcagacatcctgtgtacttgaaaagaaaactgaaagtgctatctgcatcctggtgatagtaacctctcttttctggctgttgaagtgcattcctgtgcggatgtggaaagagagaaagcaagatacagccagggctaggacaggaatgtgagtatttccttaattggacatgagagccttgaactgattccagttggagtgttttcttttagggcctggaccctaaagatttcatacagttttctttgtcagaaaaatccctttggttcaaaggcccctcgatagaaataaagaaaaagccagggctgaatttctttgatatgtgggaaggcaagagtttatgagctgccagatctcaggcttcttttggggtggaggattttgtctggtgggttcgggttgctttgtgttgttgactgctaattcactgatgaccaagtttctcaaataccttaaaaacaagccctacgtctgctcagtgctttccaatttaccaagtgttttcataacatttcttatgtacgcaaatgagtttcaccgaaaaattggctagaaacttcccttctcctactcacgttcatagtgtagctgtgaaaacaaacaaaaccacagaggcatggtaagtgtggtatggtggggaaaacaaagccattttacaggcgtgattgaagcggaggccacagagcggcagcgctgggtcccgagtgagactcccatcatgtggctcaatggaaaaatcctacccaggacgacaccacatccttgctcccacaaataaaaccttccacggaactcagggctgcagacgcagagccgagcgcgcccccgagccgccgcccgccggagctgcgagcgctgaagccattcatgattttggtgacgttattccaggagtgggcgagggagggcggggcctctcggggccaagccccgcccccgcccctataaatacggcttcccgggctctttgtggg

SEQ ID NO: 325 - DNA, 1130 bp, synthetic construct
  misc_feature 1..1130: note = Description of Artificial Sequence: Syntheticpolynucleotide
  source 1..1130: mol_type = other DNA
cactgccatctcaacatgtggtttctaggttgcctcaacagggaagagattgttggaggctcatttgctagctcttaaattctttggtcaaccacagtccattgaacagaactaatcacctgactgcaagagatctgggaaatgtgagaaacacctagatatctagtaagcaataaatatttcagttaccaaagccaaaccaaaaaaagagaaaaataattgtactttacaaagggaggcatctgggtcctgtgggagttttggggagtgaggatgtttcagagttctcaactcctgtggctatccatttcattttagcaggacatatgattaatttcttgttctggacctttgtaatttaaagtctgaatccttagcggcaagagaattgcttaatcaatggcttacaacagcagaacgtggactgccaggaaaatttccatcctgagttaagaaagaaggataatttattataagagggttgttacagaatgaagggcagaaattcagaaggattacaggatgggctggaaccacaaagcactgtctgctttttagactaggtgtggtatccttgatgggcaaagggaatattggtaaaattatttgtgacctgggttaagtcattccatttctctgggcttcaattcccctgtctataaaatgtttgagggagagaatggggaagggttctagggaaagaaggacagaataaaagtttgggtatatgaattactatttagagttggtataaagtgaaggcctttggggagatataccctgaccagaccagattattttgaatgaaatctctttctctgttccatgagcagttctgtgtgtagggagaacatttgaatggcctaatgagcaaatcacatttctctgggtctgtttccttatccataagttctgcatcactggctcctaactcaagcaatctccttgggtttctctgaggggcccctgggatcccctatcattagtccctctcacagaagcatacccttctccagagctaaaggatcagatattcagcggctcaggtaacaaacctgctgtcaggttacacatattgtttcctgaaagaccacactacagtgtcagtggagcctcaggttgcctgcagt

SEQ ID NO: 326 - DNA, 1806 bp, synthetic construct
  misc_feature 1..1806: note = Description of Artificial Sequence: Syntheticpolynucleotide
  source 1..1806: mol_type = other DNA
gaagacatagttccagtctgagtctgaagcctgggacccatgagagctgaagacgtggtcccagtctgagtctgaagcctgagacccaggagagctgaagacgtggttccagtctgagtctgaagcctgagatccaggagagctaaggacatggttctagtctgagtctgaagcctgagacccaggagagctgatggtgtggttccagtctgagtctgaagcctgagacccaggagagctgaatacgtagttccagtctgagtctgaagcctgagttccaggagagctgaggacatggttccagtctgaatctgaagcctgagacccaggagagctgatggtgtggtctgaagacgtagttccagtctgagtctgaagcctgagacccaggagagctgaagatgtggtttcagtctgtctgaagcctgagacccaggagagctgatggtgtggttccagtctgagtctgaagtctgagacccaggagagctgaagatgtggttccagtctgagtctgaagcctgagacccagcagagctgaagacatggttccagtctgagtctgaagcctgagacccaggagagctgaagatgtggtttcagtctgtctgaagcctgagacccgggagagctgaagacgtagttccagtctgagtctgaagcctgagagacccaggagagctgatggtgtggttccagtctgagtctgaagcctgagacccaggagagctgaagatgtggtttcagtctgtctgaagcttgagacccaggggagctgaagatgtagttccagtctgagtctgaagcctgagacccaggagaggtgaagacgtggtttcagtctgagtcaaggcctgagaaccaggagagctgctggtgaaagttctagtgcaagggcagaagaccaatgtcctacctagctcaacagtcaggcaggcagaagttccctgtttctcagcctttttgttctattctgttcttcagttggttggatgaggcccctgcacattaaggatagacaaaaattcaacgcatgctttactaagtaccgtttgtatcagtgggtaaagcactgtgtttggtactctctcaaatgcaaagatgattacgacacatgtactatcgtttatgaatgggtggccaacagaacagattgccgcataggtaagcagaaatctgctctcattctctattggccacaagcaggcatgtcttaggagcagaagggtaggaagatctctaactgtgcttggaaacttggggagttaccacgtctggctaaagtggtattgtcttaaggaaaacctcttactactgggcagaggcaggggaaccctggtatgagttctggattacataggagatgtgacttggacacgtttggggcttaaaagtaggaagggatcaaggggggagatttgaaaatcccggtggaggtgcgaggtatccggggagaggtgggagcagaggccctgcagcttgccaagcacacacggccctagggcgcccagctgagacggcaccttggcacccgggcccgctgcagcccgctccggtcagctgcaccccagtcaggagcctttccagcgggtcggaggagaacggaagtttggggagacccgcgcgattcgcctggctgcattttacatttctttctccggcagctggggtcacgaaggctgctctcgccggcggtgttggaacgtggacacgtgcgctttggtaatagggcagcctcccccgcgggcgcagtccccgctgcgagcgcccccggctgctgaggcgggaccgaggacccggagattt

SEQ ID NO: 327 - DNA, 1454 bp, synthetic construct
  misc_feature 1..1454: note = Description of Artificial Sequence: Syntheticpolynucleotide
  source 1..1454: mol_type = other DNA
gtgcaatttatggtatagctgggaaacgtcaaagtcaagagttttgtaggaaagtcacgtcacttagccctgtctcctgtgccgggtgagacctgtgtgtgcacttggtgacaatggctttgagtctgtcaactccagactgaggtcagccttacacacccatagttcccaaagctgaaaacaggcctgcctccaacggtacctgctaatatcaggggagccttttcagcttacagagcaccctgtatgtgtttgtcttagttcaggccaccatctccaccttaccaggcatctagaaccttctccacactttgccaacagggttcgtttgcagaattgaaatcttagttaaggtttgttgaagtttgttgttgttttttttttttttttacaattggctgttcccacccacattcccttgagacataaatagaaaaaaaaaaaaaaagaggtttcatgagtaagacaagacatttgagctgcatccacttgatccttgaaaaggaaatctaagaggttgtaactatcactttttctagcctatataaggtaggtcagtaaggtagcaaaaacacatctgttgttttgctccttcaactctttttcctgattcttcctggggggaaaccgaaaacggtgagtaactggtggacacatcagaccccagactcttttcttcactgcatgcattcatattaggctcaggtgcttagactcctgttttccggtggctctgacacctggaaggattttaatctctgggagatgggcttttcatccatctgcttcccacctttcaggacaggtgcatgccttcttccacagaatgtctgcaagcagcccaaactgtatcctttcccacgtggaatttgcaacattgcatctctcgggctgctgtaggaaaatgccagtgcatgtgtaacatggtttacggctgcctatgcaaatgactgattatgtcagtataatttttataagaaaacaattgaatccttctttgggtcattttttttttccatttttggcatgtattcaaaagaaggctctgagacaaaaaaggctggggtgttttccgtatctggttttaatttggatattctgtcccgtcacttaatacaaaaccatgcttatcacattttaaaaattctagacaggcctggctcggtggcttgcatctgtcatcccagcactttgtgaggccaaggcaggcagatcacctgaggtcaggagctcaagaccagcctggccaacatggcaaaaccccgtctctactaaaaacacaaaaattagccaggcatggtagtgcgcacctgtaatcccagctactgggaaggcttaggcaggagaatcacttgagcccaggaggcggaggttgcggtgagccgagatcacgctcttgcactccagcctgggtgacagagtgagactccgtcttaatttaaaaaaaaaaataa

SEQ ID NO: 328 - DNA, 1006 bp, synthetic construct
  misc_feature 1..1006: note = Description of Artificial Sequence: Syntheticpolynucleotide
  source 1..1006: mol_type = other DNA
gtgcaatttatggtatagctgggaaacgtcaaagtcaagagttttgtaggaaagtcacgtcacttagccctgtctcctgtgccgggtgagacctgtgtgtgcacttggtgacaatggctttgagtctgtcaactccagactgaggtcagccttacacacccatagttcccaaagctgaaaacaggcctgcctccaacggtacctgctaatatcaggggagccttttcagcttacagagcaccctgtatgtgtttgtcttagttcaggccaccatctccaccttaccaggcatctagaaccttctccacactttgccaacagggttcgtttgcagaattgaaatcttagttaaggtttgttgaagtttgttgttgttttttttttttttttacaattggctgttcccacccacattcccttgagacataaatagaaaaaaaaaaaaaaagaggtttcatgagtaagacaagacatttgagctgcatccacttgatccttgaaaagtgcaatttatggtatagctgggaaacgtcaaagtcaagagttttgtaggaaagtcacgtcacttagccctgtctcctgtgccgggtgagacctgtgtgtgcacttggtgacaatggctttgagtctgtcaactccagactgaggtcagccttacacacccatagttcccaaagctgaaaacaggcctgcctccaacggtacctgctaatatcaggggagccttttcagcttacagagcaccctgtatgtgtttgtcttagttcaggccaccatctccaccttaccaggcatctagaaccttctccacactttgccaacagggttcgtttgcagaattgaaatcttagttaaggtttgttgaagtttgttgttgttttttttttttttttacaattggctgttcccacccacattcccttgagacataaatagaaaaaaaaaaaaaaagaggtttcatgagtaagacaagacatttgagctgcatccacttgatccttgaaaa

SEQ ID NO: 329 - DNA, 1511 bp, synthetic construct
  misc_feature 1..1511: note = Description of Artificial Sequence: Syntheticpolynucleotide
  source 1..1511: mol_type = other DNA
aaagcaaactcatctctaaaccagaaataatagcaatatctatacaagtaaatacatgtactcagaacagtgcctactacatgtaaacactgaacaggtgttagcaacattgccattattgtgttagtatattaggtacctggtgctaccggcaaaaccagtttatcatccaactgtctccagtgttgctactcaaagtttggtcctccagtagcctatcaggatcacccaggggcctgttagaaaggcacatctcagaccccaccccagacctactgaatcagaatctgcgtttttaacgggatccgcaggtgattcctatgcacattaaagtgtaagaagtactgggctacagacaggtatgtgacaaaataatttcataggatggcaaaggccaagtggcaaatgaaggacaccagaaatgcacgtcccaggagcccaactcctccttagtaaattaccctattaagatttgtttagagatgttcaaaagcgtggagaaaagcaaatttggtttccctggtgcccttgaagagatcgccctcgtgtggagtagggagggaatctctagcctttcctctcggatgaagaacagcaccagcgctcccagccaaaggcctggcccaggttctggaggtggggtctccttggcagaagcctctggtgtctgcaggcgtgcatttacagctttaagaccaaacagctagtccgccacgtgtcactacagtgtgcacgcgcagaaatgcacaaagcaaaaaaaaaaaaaaagatgctcttaatgaaccaactataatccttgctaaggcataaagccagagggaagtatgtatctgaaatcattttctacccctcaccctcttggagcccggcactctggctgcggtgctctcttgtatcccagttgctagatgcaaaacaagctatttcctatctaattttttttttgttttataaattctaacttaaatgcccagaaaataactactcatactcacattgtcctctaattgaaaagataagtcaggttttttgtgtttttttttcattttaaaatcataatacgcaatgttttccacttgaacgctataccttgtgtattgtgcttgcttcagcctcgagcctctactgatgttccacctcaaggcgacaggaatgccacctggagaaactcctgggcggtatgggaagaaagccggtctcatcagagtatatttgcggggatcgacgaccaaggtgttaaattccaagcacgctttggaaagttctaggtgcttgggaagagatccgtaggcggcagggatgcccgcgccccggcgtcccagcgcggagggtggcggcggggcctggccctagcggggcggggcgggctcgggttaccgggagtcgcggggcgcggccggcactgcccgcggcgcctcctcctagagccgcacctggaggcagcgcgcgcgtcgaagaggcagcggctgtggagcgcggcggggcggctccgcccagggcagcccgggctg

SEQ ID NO: 330 - DNA, 290 bp, Homo sapiens
  source 1..290: mol_type = other DNA
cgccggtggcaggtggaaaggcgagcggcatggagcgcgtaataagagagttggagtcggaaagagcagccccagtcgccggggaagcgggaggtcagtgcgggctccggcggcccccaggctccgagcgcccgcccgcggccccggcccggcccctagcccccgccgcccgcgcccgccccgggtcgcccctctggccccgggtccgagccatgcgtctctgagcgccccgagcgcgcccccgccccggaccgtgcccgggccccggcgcccccagcccggcgccgccc

SEQ ID NO: 331 - DNA, 77 bp, synthetic construct
  misc_feature 1..77: note = Description of Artificial Sequence: Syntheticoligonucleotide
  source 1..77: mol_type = other DNA
gtggcctcgatgctgtcatagtaataccagtgtgcaggtcccaatggctggtattaatgtgacagtctcggggacgc

SEQ ID NO: 332 - DNA, 4596 bp, synthetic construct
  misc_feature 1..4596: note = Description of Artificial Sequence: Syntheticpolynucleotide
  source 1..4596: mol_type = other DNA
ctgcgcgctcgctcgctcactgaggccgcccgggcgtcgggcgacctttggtcgcccggcctcagtgagcgagcgagcgcgcagagagggagtggccaactccatcactaggggttcctgcggccgcaaggtcgggcaggaagagggcctatttcccatgattccttcatatttgcatatacgatacaaggctgttagagagataattagaattaatttgactgtaaacacaaagatattagtacaaaatacgtgacgtagaaagtaataatttcttgggtagtttgcagttttaaaattatgttttaaaatggactatcatatgcttaccgtaacttgaaagtatttcgatttcttggctttatatatcttgtggaaaggacgaaacaccgaggagcaccaggaacttgccagtttaagtactctgtgctggaaacagcacagaatctacttaaacaaggcaaaatgccgtgtttatctcgtcaacttgttggcgagattttttacgcgtcgttacataacttacggtaaatggcccgcctggctgaccgcccaacgacccccgcccattgacgtcaataatgacgtatgttcccatagtaacgccaatagggactttccattgacgtcaatgggtggagtatttacggtaaactgcccacttggcagtacatcaagtgtatcatatgccaagtacgccccctattgacgtcaatgacggtaaatggcccgcctggcattatgcccagtacatgaccttatgggactttcctacttggcagtacatctacgtattagtcatcgctattaccatggtgatgcggttttggcagtacatcaatgggcgtggatagcggtttgactcacggggatttccaagtctccaccccattgacgtcaatgggagtttgttttggcaccaaaatcaacgggactttccaaaatgtcgtaacaactccgccccattgacgcaaatgggcggtaggcgtgtacggtgggaggtctatataagcagagctcgtttagtgaaccgtcagatcgcctggagacgcaccggtgccaccatggcccctaagaagaagcggaaagtcggcagcggcaagcggaactatatcctgggcctcgacatcggcatcaccagcgttggctacggcatcatcgactacgagacacgggacgtgatcgatgccggcgtgcggctgtttaaagaggccaacgtcgagaacaacgagggccgcagatctaagagaggcgccagacggctgaagcggagaagaaggcacagaatccagagagtgaagaagctgctgttcgactacaacctgctgaccgaccacagcgagctgagcggcatcaatccttacgaggccagagtgaagggcctgagccagaagctgagcgaggaagagtttagcgccgctctgctgcacctggccaagagaagaggcgtgcacaacgtgaacgaggtggaagaggacaccggcaacgagctgtccaccaaagagcagatcagccggaacagcaaggccctggaagagaaatacgtggccgaactgcagctggaacggctgaaaaaggatggcgaagtgcggggcagcatcaatcggttcaagaccagcgactacgtgaaagaagccaaacagctgctgaaggtgcagaaggcctaccaccagctggaccagagcttcatcgacacctacatcgacctgctggaaacccggcggacctactatgaaggacctggcgagggaagccccttcggctggaaggacatcaaagaatggtacgagatgctgatgggccactgcacctactttcccgaggaactgcggagcgtgaagtacgcctacaacgccgacctgtacaacgccctgaacgacctgaacaacctcgtgatcacccgggacgagaacgagaagctggaatattacgagaagttccagatcatcgagaacgtgttcaagcagaagaagaaacccacgctgaagcagatcgccaaagagatcctggtcaacgaggaagatatcaagggctacagagtgaccagcaccggcaagcccgagttcaccaacctgaaggtgtaccacgacatcaaggatatcacagcccggaaagagattattgagaacgccgagctgctggaccaaatcgccaagatcctgaccatctaccagagcagcgaggacatccaagaggaactgaccaatctgaactccgagctgacccaagaagagatcgagcagatctctaatctgaaggggtacaccggcacacacaacctgagcctgaaggccatcaacctgatcctggacgagctgtggcacaccaacgacaaccagattgccatcttcaacaggctgaagctggtgcccaagaaggtggacctgtctcagcagaaagaaatccccaccacactggtggacgacttcattctgagccccgtggtcaagaggagcttcatccagagcatcaaagtgatcaacgccatcatcaagaagtacgggctgcccaacgatatcatcatcgagctggcccgcgagaagaactccaaggacgcccagaaaatgatcaacgagatgcagaagaggaaccgccagaccaacgagcggatcgaggaaatcatccggaccaccggcaaagagaacgccaagtacctgatcgagaagatcaagctgcacgacatgcaagagggcaagtgcctgtacagcctggaagccattcctctggaagatctgctgaacaatcccttcaactatgaggtggaccacatcatccccagaagcgtgtccttcgacaacagcttcaacaacaaggtgctcgtgaagcaagaggaaaacagcaagaagggcaacagaaccccattccagtacctgagcagcagcgacagcaagatcagctacgaaaccttcaagaagcacatcctgaatctggccaaaggcaagggcagaatcagcaagaccaagaaagaatacctgctcgaggaacgggacatcaacagattcagcgtgcagaaagacttcatcaatcggaacctggtggacaccagatacgccaccagaggcctgatgaatctgctgcggagctacttcagagtgaacaatctggacgtgaaagtcaagtccatcaacggcggcttcaccagctttctgcggcggaagtggaagttcaagaaagagcggaacaagggctataagcaccacgccgaggacgccctgatcattgccaacgccgatttcatcttcaaagagtggaagaaactggacaaggccaaaaaagtgatggaaaaccagatgttcgaggaaaagcaggccgagagcatgcccgagatcgaaaccgagcaagagtacaaagagattttcatcacgccccaccagatcaagcacattaaggacttcaaggactacaagtacagccaccgcgtggacaagaagcccaatagagagctgattaacgacaccctgtactctacccggaaggacgacaagggcaataccctgatcgtcaacaacctgaacggcctgtacgacaaggacaacgacaagctcaagaagctgatcaacaagagccccgagaaactgctgatgtaccaccacgatcctcagacctaccagaaactgaagctcatcatggaacagtacggcgacgagaagaatcccctgtacaagtactacgaggaaaccgggaactacctgaccaagtactccaaaaaggacaatgggcccgtgatcaagaagattaagtattacggcaacaagctgaatgcccacctggacatcaccgacgactaccccaacagcagaaacaaggtggtcaagctgtccctgaagccttacagattcgacgtgtacctggacaacggcgtgtacaagttcgtgaccgtgaagaacctggacgtcatcaaaaaagaaaactactacgaagtcaacagcaagtgctatgaggaagccaagaaactcaagaaaatcagcaaccaggccgagtttatcgcctccttctacaacaacgatctgatcaagatcaacggggagctgtatagagtgatcggcgtgaacaatgacctgctgaaccggatcgaagtgaacatgatcgacatcacctaccgcgagtacctcgagaacatgaacgataagcggcctccacggatcattaagacaatcgccagcaagacgcagagcattaagaagtacagcacagacatcctgggcaacctgtacgaagtgaagtctaagaagcacccgcagattatcaagaaaggcagcggcgctcccaagaaaaaacggaaggtttaagagctcgctgatcagcctcgataagatacattgatgagtttggacaaaccacaactagaatgcagtgaaaaaaatgctttatttgtgaaatttgtgatgctattgctttatttgtaaccattataagctgcaataaacaagttaagcttgaattcagctgacgtgcctcggaccgctaggaacccctagtgatggagttggccactccctctctgcgcgctcgctcgctcactgaggccgggcgaccaaaggtcgcccgacgcccgggctttgcccgggcggcctcagtgagcgagcgagcgcgcag

SEQ ID NO: 333 - DNA, 3405 bp, synthetic construct
  misc_feature 1..3405: note = Description of Artificial Sequence: Syntheticpolynucleotide
  source 1..3405: mol_type = other DNA
cctgcaggcagctgcgcgctcgctcgctcactgaggccgcccgggcgtcgggcgacctttggtcgcccggcctcagtgagcgagcgagcgcgcagagagggagtggccaactccatcactaggggttcctgcggccgcacgcgtgacattgattattgactagttattaatagtaatcaattacggggtcattagttcatagcccatatatggagttccgcgttacataacttacggtaaatggcccgcctggctgaccgcccaacgacccccgcccattgacgtcaataatgacgtatgttcccatagtaacgccaatagggactttccattgacgtcaatgggtggactatttacggtaaactgcccacttggcagtacatcaagtgtatcatatgccaagtacgccccctattgacgtcaatgacggtaaatggcccgcctggcattatgcccagtacatgaccttatgggactttcctacttggcagtacatctacgtattagtcatcgctattaccatgggtcgaggtgagccccacgttctgcttcactctccccatctcccccccctccccacccccaattttgtatttatttattttttaattattttgtgcagcgatgggggcggggggggggggggcgcgcgccaggcggggcggggcggggcgaggggcggggcggggcgaggcggagaggtgcggcggcagccaatcagagcggcgcgctccgaaagtttccttttatggcgaggcggcggcggcggcggccctataaaaagcgaagcgcgcggcgggcgggagtcgctgcgttgccttcgccccgtgccccgctccgcgccgcctcgcgccgcccgccccggctctgactgaccgcgttactcccacaggtgagcgggcgggacggcccttctcctccgggctgtaattagcgcttggtttaatgacggctcgtttcttttctgtggctgcgtgaaagccttaaagggctccgggagggccctttgtgcgggggggagcggctcggggggtgcgtgcgtgtgtgtgtgcgtggggagcgccgcgtgcggcccgcgctgcccggcggctgtgagcgctgcgggcgcggcgcggggctttgtgcgctccgcgtgtgcgcgaggggagcgcggccgggggcggtgccccgcggtgcgggggggctgcgaggggaacaaaggctgcgtgcggggtgtgtgcgtgggggggtgagcagggggtgtgggcgcggcggtcgggctgtaacccccccctgcacccccctccccgagttgctgagcacggcccggcttcgggtgcggggctccgtgcggggcgtggcgcggggctcgccgtgccgggcggggggtggcggcaggtgggggtgccgggcggggcggggccgcctcgggccggggagggctcgggggaggggcgcggcggcccccggagcgccggcggctgtcgaggcgcggcgagccgcagccattgccttttatggtaatcgtgcgagagggcgcagggacttcctttgtcccaaatctgtgcggagccgaaatctgggaggcgccgccgcaccccctctagcgggcgcggggcgaagcggtgcggcgccggcaggaaggaaatgggcggggagggccttcgtgcgtcgccgcgccgccgtccccttctccctctccagcctcggggctgtccgcggggggacggctgccttcgggggggacggggcagggcggggttcggcttctggcgtgtgaccggcggctctagagcctctgctaaccatgttcatgccttcttctttttcctacagctcctgggcaacgtgctggttattgtgaccggtcgctagccaccatggtgagcaagggcgaggagctgttcaccggggtggtgcccatcctggtcgagctggacggcgacgtaaacggccacaagttcagcgtgtccggcgagggcgagggcgatgccacctacggcaagctgaccctgaagttcatctgcaccaccggcaagctgcccgtgccctggcccaccctcgtgaccaccctgacctacggcgtgcagtgcttcagccgctaccccgaccacatgaagcagcacgacttcttcaagtccgccatgcccgaaggctacgtccaggagcgcaccatcttcttcaaggacgacggcaactacaagacccgcgccgaggtgaagttcgagggcgacaccctggtgaaccgcatcgagctgaagggcatcgacttcaaggaggacggcaacatcctggggcacaagctggagtacaactacaacagccacaacgtctatatcatggccgacaagcagaagaacggcatcaaggtgaacttcaagatccgccacaacatcgaggacggcagcgtgcagctcgccgaccactaccagcagaacacccccatcggcgacggccccgtgctgctgcccgacaaccactacctgagcacccagtccgccctgagcaaagaccccaacgagaagcgcgatcacatggtcctgctggagttcgtgaccgccgccgggatcactctcggcatggacgagctgtacaagtaataataagagctcgctgatcagcctcgactgtgccttctagttgccagccatctgttgtttgcccctcccccgtgccttccttgaccctggaaggtgccactcccactgtcctttcctaataaaatgaggaaattgcatcgcattgtctgagtaggtgtcattctattctggggggtggggtggggcaggacagcaagggggaggattgggaagacaatagcaggcatgctggggatgcggtgggctctatggttaattaaggtcgggcaggaagagggcctatttcccatgattccttcatatttgcatatacgatacaaggctgttagagagataattagaattaatttgactgtaaacacaaagatattagtacaaaatacgtgacgtagaaagtaataatttcttgggtagtttgcagttttaaaattatgttttaaaatggactatcatatgcttaccgtaacttgaaagtatttcgatttcttggctttatatatcttgtggaaaggacgaaacaccgaggagcaccaggaacttgccagtttaagtactctgtgctggaaacagcacagaatctacttaaacaaggcaaaatgccgtgtttatctcgtcaacttgttggcgagattttttctaaagcttgaattcaagcttgaattcagctgacgtgcctcggaccgctaggaacccctagtgatggagttggccactccctctctgcgcgctcgctcgctcactgaggccgggcgaccaaaggtcgcccgacgcccgggctttgcccgggcggcctcagtgagcgagcgagcgcgcagctgcctgcagg

SEQ ID NO: 334 - DNA, 4408 bp, synthetic construct
  misc_feature 1..4408: note = Description of Artificial Sequence: Syntheticpolynucleotide
  source 1..4408: mol_type = other DNA
cctgcaggcagctgcgcgctcgctcgctcactgaggccgcccgggcgtcgggcgacctttggtcgcccggcctcagtgagcgagcgagcgcgcagagagggagtggccaactccatcactaggggttcctgcggccgcacgcgtgacattgattattgactagttattaatagtaatcaattacggggtcattagttcatagcccatatatggagttccgcgttacataacttacggtaaatggcccgcctggctgaccgcccaacgacccccgcccattgacgtcaataatgacgtatgttcccatagtaacgccaatagggactttccattgacgtcaatgggtggactatttacggtaaactgcccacttggcagtacatcaagtgtatcatatgccaagtacgccccctattgacgtcaatgacggtaaatggcccgcctggcattatgcccagtacatgaccttatgggactttcctacttggcagtacatctacgtattagtcatcgctattaccatggtgcaatttatggtatagctgggaaacgtcaaagtcaagagttttgtaggaaagtcacgtcacttagccctgtctcctgtgccgggtgagacctgtgtgtgcacttggtgacaatggctttgagtctgtcaactccagactgaggtcagccttacacacccatagttcccaaagctgaaaacaggcctgcctccaacggtacctgctaatatcaggggagccttttcagcttacagagcaccctgtatgtgtttgtcttagttcaggccaccatctccaccttaccaggcatctagaaccttctccacactttgccaacagggttcgtttgcagaattgaaatcttagttaaggtttgttgaagtttgttgttgttttttttttttttttacaattggctgttcccacccacattcccttgagacataaatagaaaaaaaaaaaaaaagaggtttcatgagtaagacaagacatttgagctgcatccacttgatccttgaaaagtgcaatttatggtatagctgggaaacgtcaaagtcaagagttttgtaggaaagtcacgtcacttagccctgtctcctgtgccgggtgagacctgtgtgtgcacttggtgacaatggctttgagtctgtcaactccagactgaggtcagccttacacacccatagttcccaaagctgaaaacaggcctgcctccaacggtacctgctaatatcaggggagccttttcagcttacagagcaccctgtatgtgtttgtcttagttcaggccaccatctccaccttaccaggcatctagaaccttctccacactttgccaacagggttcgtttgcagaattgaaatcttagttaaggtttgttgaagtttgttgttgttttttttttttttttacaattggctgttcccacccacattcccttgagacataaatagaaaaaaaaaaaaaaagaggtttcatgagtaagacaagacatttgagctgcatccacttgatccttgaaaacgccggtggcaggtggaaaggcgagcggcatggagcgcgtaataagagagttggagtcggaaagagcagccccagtcgccggggaagcgggaggtcagtgcgggctccggcggcccccaggctccgagcgcccgcccgcggccccggcccggcccctagcccccgccgcccgcgcccgccccgggtcgcccctctggccccgggtccgagccatgcgtctctgagcgccccgagcgcgcccccgccccggaccgtgcccgggccccggcgcccccagcccggcgccgcccaccggtcgctagccaccatggctgaagcccctcctagaaggcttggactgggacctcctcctggggatgctcctagagctgaactggtggctctgacagccgtgcagtctgaacaaggcgaagctggtggcggcggatctccacgtagacttggactgctgggaagccctcttcctcctggtgctccacttcctggacctggcagtggatctggatctgcctgtggccagagaagctctgccgctcacaagagataccggcggctgcagaactgggtgtacaacgtgctggaaagacccagaggctgggccttcgtgtaccacgtgttcatctttctgctggtgttcagctgcctggtgctgtccgtgctgagcaccatccaagaacatcaagagctggctaacgagtgcctgttaatactggagtttgtgatgattgtggtgttcggcctcgagtacatcgtccgcgtttggagcgccggctgctgctgcagatatagaggttggcaaggcagattccgcttcgccagaaagcccttctgcgtgatcgacttcatcgtgttcgtggccagcgtggccgtgattgctgctggcacacagggcaacatcttcgccacaagcgccctgcggagcatgcggtttctgcagatcctgagaatggtccgaatggacagaagaggcggcacctggaagctgctgggctctgtggtgtacgcccacagcaaagagctgatcaccgcctggtacatcggatttctggtgctgatcttcgcctccttcctggtgtacctggccgagaaggacgccaacagcgactttagcagctacgccgactctctttggtggggcaccatcacactgaccaccatcggctacggcgacaagacccctcacacatggctgggaagagtgctggccgctggatttgctctgctgggcatcagctttttcgccctgcctgccggaatcctcggatctggctttgccctgaaggtgcaagagcagcaccggcagaagcacttcgagaagagaagaatgcctgccgccaacctgattcaggccgcttggagactgtacagcaccgacatgagcagagcctacctgaccgccacgtggtattattacgactcgatcctgcctagcttccgcgaactggccctgctgtttgagcatgtgcagagagccagaaacggcggcctcagacctctggaagttcggagagcacctgtgcctgatggcgccccttctagatatcctccagtggccacctgtcacagacccggcagcacatctttttgccctggcgagtctagccggatgggcatcaaggacagaatcagaatgggcagcagccagcggagaacaggcccttctaaacagcatctggcccctccaaccatgcctacaagccctagctctgagcaagtgggcgaagccacctctcctaccaaggtgcagaagtcctggtccttcaacgaccggaccagattcagagccagcctgagactgaagcccagaacctctgccgaggatgccccttctgaagaggtggccgaagagaagtcctaccagtgcgagctgaccgtggacgacatcatgccagccgtgaaaaccgtgatacggtctatccggatcctgaagttcctggtggccaagcggaagttcaaagagacactgcggccctacgacgtgaaggacgtgatcgagcagtattctgccggccacctggacatgctgggcagaatcaagagcctgcagaccagagtggaccagatcgttggaagaggcccaggcgacagaaaggccagagagaagggcgataagggcccatctgatgccgaggttgtcgacgagatatcaatgatgggcagagtggtcaaggtggaaaaacaggtgcagagcatcgagcacaagctggacctgctgctgggattctacagccggtgtctgagaagcggcacatctgcatctctgggcgctgtgcaggtcccactgttcgaccctgatatcaccagcgactatcacagccccgtggaccacgaggacatctccgtttctgctcagaccctgagcatcagcagatccgtgtccaccaacatggacggatcccgggctgactacaaagaccatgacggtgattataaagatcatgacatcgactacaaggatgacgatgacaagtaataagagctcgctgatcagcctcgactgtgccttctagttgccagccatctgttgtttgcccctcccccgtgccttccttgaccctggaaggtgccactcccactgtcctttcctaataaaatgaggaaattgcatcgcattgtctgagtaggtgtcattctattctggggggtggggtggggcaggacagcaagggggaggattgggaagacaatagcaggcatgctggggatgcggtgggctctatggttaattcggaccgctaggaacccctagtgatggagttggccactccctctctgcgcgctcgctcgctcactgaggccgggcgaccaaaggtcgcccgacgcccgggctttgcccgggcggcctcagtgagcgagcgagcgcgcagctgcctgcagg

SEQ ID NO: 335 - DNA, 4476 bp, synthetic construct
  misc_feature 1..4476: note = Description of Artificial Sequence: Syntheticpolynucleotide
  source 1..4476: mol_type = other DNA
cctgcaggcagctgcgcgctcgctcgctcactgaggccgcccgggcgtcgggcgacctttggtcgcccggcctcagtgagcgagcgagcgcgcagagagggagtggccaactccatcactaggggttcctgcggccgcacgcgtgtgcaatttatggtatagctgggaaacgtcaaagtcaagagttttgtaggaaagtcacgtcacttagccctgtctcctgtgccgggtgagacctgtgtgtgcacttggtgacaatggctttgagtctgtcaactccagactgaggtcagccttacacacccatagttcccaaagctgaaaacaggcctgcctccaacggtacctgctaatatcaggggagccttttcagcttacagagcaccctgtatgtgtttgtcttagttcaggccaccatctccaccttaccaggcatctagaaccttctccacactttgccaacagggttcgtttgcagaattgaaatcttagttaaggtttgttgaagtttgttgttgttttttttttttttttacaattggctgttcccacccacattcccttgagacataaatagaaaaaaaaaaaaaaagaggtttcatgagtaagacaagacatttgagctgcatccacttgatccttgaaaaggaaatctaagaggttgtaactatcactttttctagcctatataaggtaggtcagtaaggtagcaaaaacacatctgttgttttgctccttcaactctttttcctgattcttcctggggggaaaccgaaaacggtgagtaactggtggacacatcagaccccagactcttttcttcactgcatgcattcatattaggctcaggtgcttagactcctgttttccggtggctctgacacctggaaggattttaatctctgggagatgggcttttcatccatctgcttcccacctttcaggacaggtgcatgccttcttccacagaatgtctgcaagcagcccaaactgtatcctttcccacgtggaatttgcaacattgcatctctcgggctgctgtaggaaaatgccagtgcatgtgtaacatggtttacggctgcctatgcaaatgactgattatgtcagtataatttttataagaaaacaattgaatccttctttgggtcattttttttttccatttttggcatgtattcaaaagaaggctctgagacaaaaaaggctggggtgttttccgtatctggttttaatttggatattctgtcccgtcacttaatacaaaaccatgcttatcacattttaaaaattctagacaggcctggctcggtggcttgcatctgtcatcccagcactttgtgaggccaaggcaggcagatcacctgaggtcaggagctcaagaccagcctggccaacatggcaaaaccccgtctctactaaaaacacaaaaattagccaggcatggtagtgcgcacctgtaatcccagctactgggaaggcttaggcaggagaatcacttgagcccaggaggcggaggttgcggtgagccgagatcacgctcttgcactccagcctgggtgacagagtgagactccgtcttaatttaaaaaaaaaaataacgccggtggcaggtggaaaggcgagcggcatggagcgcgtaataagagagttggagtcggaaagagcagccccagtcgccggggaagcgggaggtcagtgcgggctccggcggcccccaggctccgagcgcccgcccgcggccccggcccggcccctagcccccgccgcccgcgcccgccccgggtcgcccctctggccccgggtccgagccatgcgtctctgagcgccccgagcgcgcccccgccccggaccgtgcccgggccccggcgcccccagcccggcgccgcccaccggtcgctagccaccatggctgaagcccctcctagaaggcttggactgggacctcctcctggggatgctcctagagctgaactggtggctctgacagccgtgcagtctgaacaaggcgaagctggtggcggcggatctccacgtagacttggactgctgggaagccctcttcctcctggtgctccacttcctggacctggcagtggatctggatctgcctgtggccagagaagctctgccgctcacaagagataccggcggctgcagaactgggtgtacaacgtgctggaaagacccagaggctgggccttcgtgtaccacgtgttcatctttctgctggtgttcagctgcctggtgctgtccgtgctgagcaccatccaagaacatcaagagctggctaacgagtgcctgttaatactggagtttgtgatgattgtggtgttcggcctcgagtacatcgtccgcgtttggagcgccggctgctgctgcagatatagaggttggcaaggcagattccgcttcgccagaaagcccttctgcgtgatcgacttcatcgtgttcgtggccagcgtggccgtgattgctgctggcacacagggcaacatcttcgccacaagcgccctgcggagcatgcggtttctgcagatcctgagaatggtccgaatggacagaagaggcggcacctggaagctgctgggctctgtggtgtacgcccacagcaaagagctgatcaccgcctggtacatcggatttctggtgctgatcttcgcctccttcctggtgtacctggccgagaaggacgccaacagcgactttagcagctacgccgactctctttggtggggcaccatcacactgaccaccatcggctacggcgacaagacccctcacacatggctgggaagagtgctggccgctggatttgctctgctgggcatcagctttttcgccctgcctgccggaatcctcggatctggctttgccctgaaggtgcaagagcagcaccggcagaagcacttcgagaagagaagaatgcctgccgccaacctgattcaggccgcttggagactgtacagcaccgacatgagcagagcctacctgaccgccacgtggtattattacgactcgatcctgcctagcttccgcgaactggccctgctgtttgagcatgtgcagagagccagaaacggcggcctcagacctctggaagttcggagagcacctgtgcctgatggcgccccttctagatatcctccagtggccacctgtcacagacccggcagcacatctttttgccctggcgagtctagccggatgggcatcaaggacagaatcagaatgggcagcagccagcggagaacaggcccttctaaacagcatctggcccctccaaccatgcctacaagccctagctctgagcaagtgggcgaagccacctctcctaccaaggtgcagaagtcctggtccttcaacgaccggaccagattcagagccagcctgagactgaagcccagaacctctgccgaggatgccccttctgaagaggtggccgaagagaagtcctaccagtgcgagctgaccgtggacgacatcatgccagccgtgaaaaccgtgatacggtctatccggatcctgaagttcctggtggccaagcggaagttcaaagagacactgcggccctacgacgtgaaggacgtgatcgagcagtattctgccggccacctggacatgctgggcagaatcaagagcctgcagaccagagtggaccagatcgttggaagaggcccaggcgacagaaaggccagagagaagggcgataagggcccatctgatgccgaggttgtcgacgagatatcaatgatgggcagagtggtcaaggtggaaaaacaggtgcagagcatcgagcacaagctggacctgctgctgggattctacagccggtgtctgagaagcggcacatctgcatctctgggcgctgtgcaggtcccactgttcgaccctgatatcaccagcgactatcacagccccgtggaccacgaggacatctccgtttctgctcagaccctgagcatcagcagatccgtgtccaccaacatggacggatcccgggctgactacaaagaccatgacggtgattataaagatcatgacatcgactacaaggatgacgatgacaagtaataagagctcgctgatcagcctcgactgtgccttctagttgccagccatctgttgtttgcccctcccccgtgccttccttgaccctggaaggtgccactcccactgtcctttcctaataaaatgaggaaattgcatcgcattgtctgagtaggtgtcattctattctggggggtggggtggggcaggacagcaagggggaggattgggaagacaatagcaggcatgctggggatgcggtgggctctatggttaattcggaccgctaggaacccctagtgatggagttggccactccctctctgcgcgctcgctcgctcactgaggccgggcgaccaaaggtcgcccgacgcccgggctttgcccgggcggcctcagtgagcgagcgagcgcgcagctgcctgcagg

SEQ ID NO: 336 - DNA, 4776 bp, synthetic construct
  misc_feature 1..4776: note = Description of Artificial Sequence: Syntheticpolynucleotide
  source 1..4776: mol_type = other DNA
cctgcaggcagctgcgcgctcgctcgctcactgaggccgcccgggcgtcgggcgacctttggtcgcccggcctcagtgagcgagcgagcgcgcagagagggagtggccaactccatcactaggggttcctgcggccgcacgcgtgtgcaatttatggtatagctgggaaacgtcaaagtcaagagttttgtaggaaagtcacgtcacttagccctgtctcctgtgccgggtgagacctgtgtgtgcacttggtgacaatggctttgagtctgtcaactccagactgaggtcagccttacacacccatagttcccaaagctgaaaacaggcctgcctccaacggtacctgctaatatcaggggagccttttcagcttacagagcaccctgtatgtgtttgtcttagttcaggccaccatctccaccttaccaggcatctagaaccttctccacactttgccaacagggttcgtttgcagaattgaaatcttagttaaggtttgttgaagtttgttgttgttttttttttttttttacaattggctgttcccacccacattcccttgagacataaatagaaaaaaaaaaaaaaagaggtttcatgagtaagacaagacatttgagctgcatccacttgatccttgaaaaggaaatctaagaggttgtaactatcactttttctagcctatataaggtaggtcagtaaggtagcaaaaacacatctgttgttttgctccttcaactctttttcctgattcttcctggggggaaaccgaaaacggtgagtaactggtggacacatcagaccccagactcttttcttcactgcatgcattcatattaggctcaggtgcttagactcctgttttccggtggctctgacacctggaaggattttaatctctgggagatgggcttttcatccatctgcttcccacctttcaggacaggtgcatgccttcttccacagaatgtctgcaagcagcccaaactgtatcctttcccacgtggaatttgcaacattgcatctctcgggctgctgtaggaaaatgccagtgcatgtgtaacatggtttacggctgcctatgcaaatgactgattatgtcagtataatttttataagaaaacaattgaatccttctttgggtcattttttttttccatttttggcatgtattcaaaagaaggctctgagacaaaaaaggctggggtgttttccgtatctggttttaatttggatattctgtcccgtcacttaatacaaaaccatgcttatcacattttaaaaattctagacaggcctggctcggtggcttgcatctgtcatcccagcactttgtgaggccaaggcaggcagatcacctgaggtcaggagctcaagaccagcctggccaacatggcaaaaccccgtctctactaaaaacacaaaaattagccaggcatggtagtgcgcacctgtaatcccagctactgggaaggcttaggcaggagaatcacttgagcccaggaggcggaggttgcggtgagccgagatcacgctcttgcactccagcctgggtgacagagtgagactccgtcttaatttaaaaaaaaaaataacgccggtggcaggtggaaaggcgagcggcatggagcgcgtaataagagagttggagtcggaaagagcagccccagtcgccggggaagcgggaggtcagtgcgggctccggcggcccccaggctccgagcgcccgcccgcggccccggcccggcccctagcccccgccgcccgcgcccgccccgggtcgcccctctggccccgggtccgagccatgcgtctctgagcgccccgagcgcgcccccgccccggaccgtgcccgggccccggcgcccccagcccggcgccgcccaccggtcgctagccaccatggctgaagcccctcctagaaggcttggactgggacctcctcctggggatgctcctagagctgaactggtggctctgacagccgtgcagtctgaacaaggcgaagctggtggcggcggatctccacgtagacttggactgctgggaagccctcttcctcctggtgctccacttcctggacctggcagtggatctggatctgcctgtggccagagaagctctgccgctcacaagagataccggcggctgcagaactgggtgtacaacgtgctggaaagacccagaggctgggccttcgtgtaccacgtgttcatctttctgctggtgttcagctgcctggtgctgtccgtgctgagcaccatccaagaacatcaagagctggctaacgagtgcctgttaatactggagtttgtgatgattgtggtgttcggcctcgagtacatcgtccgcgtttggagcgccggctgctgctgcagatatagaggttggcaaggcagattccgcttcgccagaaagcccttctgcgtgatcgacttcatcgtgttcgtggccagcgtggccgtgattgctgctggcacacagggcaacatcttcgccacaagcgccctgcggagcatgcggtttctgcagatcctgagaatggtccgaatggacagaagaggcggcacctggaagctgctgggctctgtggtgtacgcccacagcaaagagctgatcaccgcctggtacatcggatttctggtgctgatcttcgcctccttcctggtgtacctggccgagaaggacgccaacagcgactttagcagctacgccgactctctttggtggggcaccatcacactgaccaccatcggctacggcgacaagacccctcacacatggctgggaagagtgctggccgctggatttgctctgctgggcatcagctttttcgccctgcctgccggaatcctcggatctggctttgccctgaaggtgcaagagcagcaccggcagaagcacttcgagaagagaagaatgcctgccgccaacctgattcaggccgcttggagactgtacagcaccgacatgagcagagcctacctgaccgccacgtggtattattacgactcgatcctgcctagcttccgcgaactggccctgctgtttgagcatgtgcagagagccagaaacggcggcctcagacctctggaagttcggagagcacctgtgcctgatggcgccccttctagatatcctccagtggccacctgtcacagacccggcagcacatctttttgccctggcgagtctagccggatgggcatcaaggacagaatcagaatgggcagcagccagcggagaacaggcccttctaaacagcatctggcccctccaaccatgcctacaagccctagctctgagcaagtgggcgaagccacctctcctaccaaggtgcagaagtcctggtccttcaacgaccggaccagattcagagccagcctgagactgaagcccagaacctctgccgaggatgccccttctgaagaggtggccgaagagaagtcctaccagtgcgagctgaccgtggacgacatcatgccagccgtgaaaaccgtgatacggtctatccggatcctgaagttcctggtggccaagcggaagttcaaagagacactgcggccctacgacgtgaaggacgtgatcgagcagtattctgccggccacctggacatgctgggcagaatcaagagcctgcagaccagagtggaccagatcgttggaagaggcccaggcgacagaaaggccagagagaagggcgataagggcccatctgatgccgaggttgtcgacgagatatcaatgatgggcagagtggtcaaggtggaaaaacaggtgcagagcatcgagcacaagctggacctgctgctgggattctacagccggtgtctgagaagcggcacatctgcatctctgggcgctgtgcaggtcccactgttcgaccctgatatcaccagcgactatcacagccccgtggaccacgaggacatctccgtttctgctcagaccctgagcatcagcagatccgtgtccaccaacatggactaataagagctcgctgatcagcctcgactgtgccttctagttgccagccatctgttgtttgcccctcccccgtgccttccttgaccctggaaggtgccactcccactgtcctttcctaataaaatgaggaaattgcatcgcattgtctgagtaggtgtcattctattctggggggtggggtggggcaggacagcaagggggaggattgggaagacaatagcaggcatgctggggatgcggtgggctctatggttaattaaggtcgggcaggaagagggcctatttcccatgattccttcatatttgcatatacgatacaaggctgttagagagataattagaattaatttgactgtaaacacaaagatattagtacaaaatacgtgacgtagaaagtaataatttcttgggtagtttgcagttttaaaattatgttttaaaatggactatcatatgcttaccgtaacttgaaagtatttcgatttcttggctttatatatcttgtggaaaggacgaaacaccgaggagcaccaggaacttgccagtttaagtactctgtgctggaaacagcacagaatctacttaaacaaggcaaaatgccgtgtttatctcgtcaacttgttggcgagattttttcggaccgctaggaacccctagtgatggagttggccactccctctctgcgcgctcgctcgctcactgaggccgggcgaccaaaggtcgcccgacgcccgggctttgcccgggcggcctcagtgagcgagcgagcgcgcagctgcctgcagg

SEQ ID NO: 337 - DNA, 4028 bp, synthetic construct
  misc_feature 1..4028: note = Description of Artificial Sequence: Syntheticpolynucleotide
  source 1..4028: mol_type = other DNA
cctgcaggcagctgcgcgctcgctcgctcactgaggccgcccgggcgtcgggcgacctttggtcgcccggcctcagtgagcgagcgagcgcgcagagagggagtggccaactccatcactaggggttcctgcggccgcacgcgtgtgcaatttatggtatagctgggaaacgtcaaagtcaagagttttgtaggaaagtcacgtcacttagccctgtctcctgtgccgggtgagacctgtgtgtgcacttggtgacaatggctttgagtctgtcaactccagactgaggtcagccttacacacccatagttcccaaagctgaaaacaggcctgcctccaacggtacctgctaatatcaggggagccttttcagcttacagagcaccctgtatgtgtttgtcttagttcaggccaccatctccaccttaccaggcatctagaaccttctccacactttgccaacagggttcgtttgcagaattgaaatcttagttaaggtttgttgaagtttgttgttgttttttttttttttttacaattggctgttcccacccacattcccttgagacataaatagaaaaaaaaaaaaaaagaggtttcatgagtaagacaagacatttgagctgcatccacttgatccttgaaaagtgcaatttatggtatagctgggaaacgtcaaagtcaagagttttgtaggaaagtcacgtcacttagccctgtctcctgtgccgggtgagacctgtgtgtgcacttggtgacaatggctttgagtctgtcaactccagactgaggtcagccttacacacccatagttcccaaagctgaaaacaggcctgcctccaacggtacctgctaatatcaggggagccttttcagcttacagagcaccctgtatgtgtttgtcttagttcaggccaccatctccaccttaccaggcatctagaaccttctccacactttgccaacagggttcgtttgcagaattgaaatcttagttaaggtttgttgaagtttgttgttgttttttttttttttttacaattggctgttcccacccacattcccttgagacataaatagaaaaaaaaaaaaaaagaggtttcatgagtaagacaagacatttgagctgcatccacttgatccttgaaaacgccggtggcaggtggaaaggcgagcggcatggagcgcgtaataagagagttggagtcggaaagagcagccccagtcgccggggaagcgggaggtcagtgcgggctccggcggcccccaggctccgagcgcccgcccgcggccccggcccggcccctagcccccgccgcccgcgcccgccccgggtcgcccctctggccccgggtccgagccatgcgtctctgagcgccccgagcgcgcccccgccccggaccgtgcccgggccccggcgcccccagcccggcgccgcccaccggtcgctagccaccatggctgaagcccctcctagaaggcttggactgggacctcctcctggggatgctcctagagctgaactggtggctctgacagccgtgcagtctgaacaaggcgaagctggtggcggcggatctccacgtagacttggactgctgggaagccctcttcctcctggtgctccacttcctggacctggcagtggatctggatctgcctgtggccagagaagctctgccgctcacaagagataccggcggctgcagaactgggtgtacaacgtgctggaaagacccagaggctgggccttcgtgtaccacgtgttcatctttctgctggtgttcagctgcctggtgctgtccgtgctgagcaccatccaagaacatcaagagctggctaacgagtgcctgttaatactggagtttgtgatgattgtggtgttcggcctcgagtacatcgtccgcgtttggagcgccggctgctgctgcagatatagaggttggcaaggcagattccgcttcgccagaaagcccttctgcgtgatcgacttcatcgtgttcgtggccagcgtggccgtgattgctgctggcacacagggcaacatcttcgccacaagcgccctgcggagcatgcggtttctgcagatcctgagaatggtccgaatggacagaagaggcggcacctggaagctgctgggctctgtggtgtacgcccacagcaaagagctgatcaccgcctggtacatcggatttctggtgctgatcttcgcctccttcctggtgtacctggccgagaaggacgccaacagcgactttagcagctacgccgactctctttggtggggcaccatcacactgaccaccatcggctacggcgacaagacccctcacacatggctgggaagagtgctggccgctggatttgctctgctgggcatcagctttttcgccctgcctgccggaatcctcggatctggctttgccctgaaggtgcaagagcagcaccggcagaagcacttcgagaagagaagaatgcctgccgccaacctgattcaggccgcttggagactgtacagcaccgacatgagcagagcctacctgaccgccacgtggtattattacgactcgatcctgcctagcttccgcgaactggccctgctgtttgagcatgtgcagagagccagaaacggcggcctcagacctctggaagttcggagagcacctgtgcctgatggcgccccttctagatatcctccagtggccacctgtcacagacccggcagcacatctttttgccctggcgagtctagccggatgggcatcaaggacagaatcagaatgggcagcagccagcggagaacaggcccttctaaacagcatctggcccctccaaccatgcctacaagccctagctctgagcaagtgggcgaagccacctctcctaccaaggtgcagaagtcctggtccttcaacgaccggaccagattcagagccagcctgagactgaagcccagaacctctgccgaggatgccccttctgaagaggtggccgaagagaagtcctaccagtgcgagctgaccgtggacgacatcatgccagccgtgaaaaccgtgatacggtctatccggatcctgaagttcctggtggccaagcggaagttcaaagagacactgcggccctacgacgtgaaggacgtgatcgagcagtattctgccggccacctggacatgctgggcagaatcaagagcctgcagaccagagtggaccagatcgttggaagaggcccaggcgacagaaaggccagagagaagggcgataagggcccatctgatgccgaggttgtcgacgagatatcaatgatgggcagagtggtcaaggtggaaaaacaggtgcagagcatcgagcacaagctggacctgctgctgggattctacagccggtgtctgagaagcggcacatctgcatctctgggcgctgtgcaggtcccactgttcgaccctgatatcaccagcgactatcacagccccgtggaccacgaggacatctccgtttctgctcagaccctgagcatcagcagatccgtgtccaccaacatggacggatcccgggctgactacaaagaccatgacggtgattataaagatcatgacatcgactacaaggatgacgatgacaagtaataagagctcgctgatcagcctcgactgtgccttctagttgccagccatctgttgtttgcccctcccccgtgccttccttgaccctggaaggtgccactcccactgtcctttcctaataaaatgaggaaattgcatcgcattgtctgagtaggtgtcattctattctggggggtggggtggggcaggacagcaagggggaggattgggaagacaatagcaggcatgctggggatgcggtgggctctatggttaattcggaccgctaggaacccctagtgatggagttggccactccctctctgcgcgctcgctcgctcactgaggccgggcgaccaaaggtcgcccgacgcccgggctttgcccgggcggcctcagtgagcgagcgagcgcgcagctgcctgcagg

SEQ ID NO: 338 - DNA, 4328 bp, synthetic construct
  misc_feature 1..4328: note = Description of Artificial Sequence: Syntheticpolynucleotide
  source 1..4328: mol_type = other DNA
cctgcaggcagctgcgcgctcgctcgctcactgaggccgcccgggcgtcgggcgacctttggtcgcccggcctcagtgagcgagcgagcgcgcagagagggagtggccaactccatcactaggggttcctgcggccgcacgcgtgtgcaatttatggtatagctgggaaacgtcaaagtcaagagttttgtaggaaagtcacgtcacttagccctgtctcctgtgccgggtgagacctgtgtgtgcacttggtgacaatggctttgagtctgtcaactccagactgaggtcagccttacacacccatagttcccaaagctgaaaacaggcctgcctccaacggtacctgctaatatcaggggagccttttcagcttacagagcaccctgtatgtgtttgtcttagttcaggccaccatctccaccttaccaggcatctagaaccttctccacactttgccaacagggttcgtttgcagaattgaaatcttagttaaggtttgttgaagtttgttgttgttttttttttttttttacaattggctgttcccacccacattcccttgagacataaatagaaaaaaaaaaaaaaagaggtttcatgagtaagacaagacatttgagctgcatccacttgatccttgaaaagtgcaatttatggtatagctgggaaacgtcaaagtcaagagttttgtaggaaagtcacgtcacttagccctgtctcctgtgccgggtgagacctgtgtgtgcacttggtgacaatggctttgagtctgtcaactccagactgaggtcagccttacacacccatagttcccaaagctgaaaacaggcctgcctccaacggtacctgctaatatcaggggagccttttcagcttacagagcaccctgtatgtgtttgtcttagttcaggccaccatctccaccttaccaggcatctagaaccttctccacactttgccaacagggttcgtttgcagaattgaaatcttagttaaggtttgttgaagtttgttgttgttttttttttttttttacaattggctgttcccacccacattcccttgagacataaatagaaaaaaaaaaaaaaagaggtttcatgagtaagacaagacatttgagctgcatccacttgatccttgaaaacgccggtggcaggtggaaaggcgagcggcatggagcgcgtaataagagagttggagtcggaaagagcagccccagtcgccggggaagcgggaggtcagtgcgggctccggcggcccccaggctccgagcgcccgcccgcggccccggcccggcccctagcccccgccgcccgcgcccgccccgggtcgcccctctggccccgggtccgagccatgcgtctctgagcgccccgagcgcgcccccgccccggaccgtgcccgggccccggcgcccccagcccggcgccgcccaccggtcgctagccaccatggctgaagcccctcctagaaggcttggactgggacctcctcctggggatgctcctagagctgaactggtggctctgacagccgtgcagtctgaacaaggcgaagctggtggcggcggatctccacgtagacttggactgctgggaagccctcttcctcctggtgctccacttcctggacctggcagtggatctggatctgcctgtggccagagaagctctgccgctcacaagagataccggcggctgcagaactgggtgtacaacgtgctggaaagacccagaggctgggccttcgtgtaccacgtgttcatctttctgctggtgttcagctgcctggtgctgtccgtgctgagcaccatccaagaacatcaagagctggctaacgagtgcctgttaatactggagtttgtgatgattgtggtgttcggcctcgagtacatcgtccgcgtttggagcgccggctgctgctgcagatatagaggttggcaaggcagattccgcttcgccagaaagcccttctgcgtgatcgacttcatcgtgttcgtggccagcgtggccgtgattgctgctggcacacagggcaacatcttcgccacaagcgccctgcggagcatgcggtttctgcagatcctgagaatggtccgaatggacagaagaggcggcacctggaagctgctgggctctgtggtgtacgcccacagcaaagagctgatcaccgcctggtacatcggatttctggtgctgatcttcgcctccttcctggtgtacctggccgagaaggacgccaacagcgactttagcagctacgccgactctctttggtggggcaccatcacactgaccaccatcggctacggcgacaagacccctcacacatggctgggaagagtgctggccgctggatttgctctgctgggcatcagctttttcgccctgcctgccggaatcctcggatctggctttgccctgaaggtgcaagagcagcaccggcagaagcacttcgagaagagaagaatgcctgccgccaacctgattcaggccgcttggagactgtacagcaccgacatgagcagagcctacctgaccgccacgtggtattattacgactcgatcctgcctagcttccgcgaactggccctgctgtttgagcatgtgcagagagccagaaacggcggcctcagacctctggaagttcggagagcacctgtgcctgatggcgccccttctagatatcctccagtggccacctgtcacagacccggcagcacatctttttgccctggcgagtctagccggatgggcatcaaggacagaatcagaatgggcagcagccagcggagaacaggcccttctaaacagcatctggcccctccaaccatgcctacaagccctagctctgagcaagtgggcgaagccacctctcctaccaaggtgcagaagtcctggtccttcaacgaccggaccagattcagagccagcctgagactgaagcccagaacctctgccgaggatgccccttctgaagaggtggccgaagagaagtcctaccagtgcgagctgaccgtggacgacatcatgccagccgtgaaaaccgtgatacggtctatccggatcctgaagttcctggtggccaagcggaagttcaaagagacactgcggccctacgacgtgaaggacgtgatcgagcagtattctgccggccacctggacatgctgggcagaatcaagagcctgcagaccagagtggaccagatcgttggaagaggcccaggcgacagaaaggccagagagaagggcgataagggcccatctgatgccgaggttgtcgacgagatatcaatgatgggcagagtggtcaaggtggaaaaacaggtgcagagcatcgagcacaagctggacctgctgctgggattctacagccggtgtctgagaagcggcacatctgcatctctgggcgctgtgcaggtcccactgttcgaccctgatatcaccagcgactatcacagccccgtggaccacgaggacatctccgtttctgctcagaccctgagcatcagcagatccgtgtccaccaacatggactaataagagctcgctgatcagcctcgactgtgccttctagttgccagccatctgttgtttgcccctcccccgtgccttccttgaccctggaaggtgccactcccactgtcctttcctaataaaatgaggaaattgcatcgcattgtctgagtaggtgtcattctattctggggggtggggtggggcaggacagcaagggggaggattgggaagacaatagcaggcatgctggggatgcggtgggctctatggttaattaaggtcgggcaggaagagggcctatttcccatgattccttcatatttgcatatacgatacaaggctgttagagagataattagaattaatttgactgtaaacacaaagatattagtacaaaatacgtgacgtagaaagtaataatttcttgggtagtttgcagttttaaaattatgttttaaaatggactatcatatgcttaccgtaacttgaaagtatttcgatttcttggctttatatatcttgtggaaaggacgaaacaccgaggagcaccaggaacttgccagtttaagtactctgtgctggaaacagcacagaatctacttaaacaaggcaaaatgccgtgtttatctcgtcaacttgttggcgagattttttcggaccgctaggaacccctagtgatggagttggccactccctctctgcgcgctcgctcgctcactgaggccgggcgaccaaaggtcgcccgacgcccgggctttgcccgggcggcctcagtgagcgagcgagcgcgcagctgcctgcagg

SEQ ID NO: 339 - DNA, 4533 bp, synthetic construct
  misc_feature 1..4533: note = Description of Artificial Sequence: Syntheticpolynucleotide
  source 1..4533: mol_type = other DNA
cctgcaggcagctgcgcgctcgctcgctcactgaggccgcccgggcgtcgggcgacctttggtcgcccggcctcagtgagcgagcgagcgcgcagagagggagtggccaactccatcactaggggttcctgcggccgcacgcgtaaagcaaactcatctctaaaccagaaataatagcaatatctatacaagtaaatacatgtactcagaacagtgcctactacatgtaaacactgaacaggtgttagcaacattgccattattgtgttagtatattaggtacctggtgctaccggcaaaaccagtttatcatccaactgtctccagtgttgctactcaaagtttggtcctccagtagcctatcaggatcacccaggggcctgttagaaaggcacatctcagaccccaccccagacctactgaatcagaatctgcgtttttaacgggatccgcaggtgattcctatgcacattaaagtgtaagaagtactgggctacagacaggtatgtgacaaaataatttcataggatggcaaaggccaagtggcaaatgaaggacaccagaaatgcacgtcccaggagcccaactcctccttagtaaattaccctattaagatttgtttagagatgttcaaaagcgtggagaaaagcaaatttggtttccctggtgcccttgaagagatcgccctcgtgtggagtagggagggaatctctagcctttcctctcggatgaagaacagcaccagcgctcccagccaaaggcctggcccaggttctggaggtggggtctccttggcagaagcctctggtgtctgcaggcgtgcatttacagctttaagaccaaacagctagtccgccacgtgtcactacagtgtgcacgcgcagaaatgcacaaagcaaaaaaaaaaaaaaagatgctcttaatgaaccaactataatccttgctaaggcataaagccagagggaagtatgtatctgaaatcattttctacccctcaccctcttggagcccggcactctggctgcggtgctctcttgtatcccagttgctagatgcaaaacaagctatttcctatctaattttttttttgttttataaattctaacttaaatgcccagaaaataactactcatactcacattgtcctctaattgaaaagataagtcaggttttttgtgtttttttttcattttaaaatcataatacgcaatgttttccacttgaacgctataccttgtgtattgtgcttgcttcagcctcgagcctctactgatgttccacctcaaggcgacaggaatgccacctggagaaactcctgggcggtatgggaagaaagccggtctcatcagagtatatttgcggggatcgacgaccaaggtgttaaattccaagcacgctttggaaagttctaggtgcttgggaagagatccgtaggcggcagggatgcccgcgccccggcgtcccagcgcggagggtggcggcggggcctggccctagcggggcggggcgggctcgggttaccgggagtcgcggggcgcggccggcactgcccgcggcgcctcctcctagagccgcacctggaggcagcgcgcgcgtcgaagaggcagcggctgtggagcgcggcggggcggctccgcccagggcagcccgggctgcgccggtggcaggtggaaaggcgagcggcatggagcgcgtaataagagagttggagtcggaaagagcagccccagtcgccggggaagcgggaggtcagtgcgggctccggcggcccccaggctccgagcgcccgcccgcggccccggcccggcccctagcccccgccgcccgcgcccgccccgggtcgcccctctggccccgggtccgagccatgcgtctctgagcgccccgagcgcgcccccgccccggaccgtgcccgggccccggcgcccccagcccggcgccgcccaccggtcgctagccaccatggctgaagcccctcctagaaggcttggactgggacctcctcctggggatgctcctagagctgaactggtggctctgacagccgtgcagtctgaacaaggcgaagctggtggcggcggatctccacgtagacttggactgctgggaagccctcttcctcctggtgctccacttcctggacctggcagtggatctggatctgcctgtggccagagaagctctgccgctcacaagagataccggcggctgcagaactgggtgtacaacgtgctggaaagacccagaggctgggccttcgtgtaccacgtgttcatctttctgctggtgttcagctgcctggtgctgtccgtgctgagcaccatccaagaacatcaagagctggctaacgagtgcctgttaatactggagtttgtgatgattgtggtgttcggcctcgagtacatcgtccgcgtttggagcgccggctgctgctgcagatatagaggttggcaaggcagattccgcttcgccagaaagcccttctgcgtgatcgacttcatcgtgttcgtggccagcgtggccgtgattgctgctggcacacagggcaacatcttcgccacaagcgccctgcggagcatgcggtttctgcagatcctgagaatggtccgaatggacagaagaggcggcacctggaagctgctgggctctgtggtgtacgcccacagcaaagagctgatcaccgcctggtacatcggatttctggtgctgatcttcgcctccttcctggtgtacctggccgagaaggacgccaacagcgactttagcagctacgccgactctctttggtggggcaccatcacactgaccaccatcggctacggcgacaagacccctcacacatggctgggaagagtgctggccgctggatttgctctgctgggcatcagctttttcgccctgcctgccggaatcctcggatctggctttgccctgaaggtgcaagagcagcaccggcagaagcacttcgagaagagaagaatgcctgccgccaacctgattcaggccgcttggagactgtacagcaccgacatgagcagagcctacctgaccgccacgtggtattattacgactcgatcctgcctagcttccgcgaactggccctgctgtttgagcatgtgcagagagccagaaacggcggcctcagacctctggaagttcggagagcacctgtgcctgatggcgccccttctagatatcctccagtggccacctgtcacagacccggcagcacatctttttgccctggcgagtctagccggatgggcatcaaggacagaatcagaatgggcagcagccagcggagaacaggcccttctaaacagcatctggcccctccaaccatgcctacaagccctagctctgagcaagtgggcgaagccacctctcctaccaaggtgcagaagtcctggtccttcaacgaccggaccagattcagagccagcctgagactgaagcccagaacctctgccgaggatgccccttctgaagaggtggccgaagagaagtcctaccagtgcgagctgaccgtggacgacatcatgccagccgtgaaaaccgtgatacggtctatccggatcctgaagttcctggtggccaagcggaagttcaaagagacactgcggccctacgacgtgaaggacgtgatcgagcagtattctgccggccacctggacatgctgggcagaatcaagagcctgcagaccagagtggaccagatcgttggaagaggcccaggcgacagaaaggccagagagaagggcgataagggcccatctgatgccgaggttgtcgacgagatatcaatgatgggcagagtggtcaaggtggaaaaacaggtgcagagcatcgagcacaagctggacctgctgctgggattctacagccggtgtctgagaagcggcacatctgcatctctgggcgctgtgcaggtcccactgttcgaccctgatatcaccagcgactatcacagccccgtggaccacgaggacatctccgtttctgctcagaccctgagcatcagcagatccgtgtccaccaacatggacggatcccgggctgactacaaagaccatgacggtgattataaagatcatgacatcgactacaaggatgacgatgacaagtaataagagctcgctgatcagcctcgactgtgccttctagttgccagccatctgttgtttgcccctcccccgtgccttccttgaccctggaaggtgccactcccactgtcctttcctaataaaatgaggaaattgcatcgcattgtctgagtaggtgtcattctattctggggggtggggtggggcaggacagcaagggggaggattgggaagacaatagcaggcatgctggggatgcggtgggctctatggttaattcggaccgctaggaacccctagtgatggagttggccactccctctctgcgcgctcgctcgctcactgaggccgggcgaccaaaggtcgcccgacgcccgggctttgcccgggcggcctcagtgagcgagcgagcgcgcagctgcctgcagg

SEQ ID NO: 340 - DNA, 4833 bp, synthetic construct
  misc_feature 1..4833: note = Description of Artificial Sequence: Syntheticpolynucleotide
  source 1..4833: mol_type = other DNA
cctgcaggcagctgcgcgctcgctcgctcactgaggccgcccgggcgtcgggcgacctttggtcgcccggcctcagtgagcgagcgagcgcgcagagagggagtggccaactccatcactaggggttcctgcggccgcacgcgtaaagcaaactcatctctaaaccagaaataatagcaatatctatacaagtaaatacatgtactcagaacagtgcctactacatgtaaacactgaacaggtgttagcaacattgccattattgtgttagtatattaggtacctggtgctaccggcaaaaccagtttatcatccaactgtctccagtgttgctactcaaagtttggtcctccagtagcctatcaggatcacccaggggcctgttagaaaggcacatctcagaccccaccccagacctactgaatcagaatctgcgtttttaacgggatccgcaggtgattcctatgcacattaaagtgtaagaagtactgggctacagacaggtatgtgacaaaataatttcataggatggcaaaggccaagtggcaaatgaaggacaccagaaatgcacgtcccaggagcccaactcctccttagtaaattaccctattaagatttgtttagagatgttcaaaagcgtggagaaaagcaaatttggtttccctggtgcccttgaagagatcgccctcgtgtggagtagggagggaatctctagcctttcctctcggatgaagaacagcaccagcgctcccagccaaaggcctggcccaggttctggaggtggggtctccttggcagaagcctctggtgtctgcaggcgtgcatttacagctttaagaccaaacagctagtccgccacgtgtcactacagtgtgcacgcgcagaaatgcacaaagcaaaaaaaaaaaaaaagatgctcttaatgaaccaactataatccttgctaaggcataaagccagagggaagtatgtatctgaaatcattttctacccctcaccctcttggagcccggcactctggctgcggtgctctcttgtatcccagttgctagatgcaaaacaagctatttcctatctaattttttttttgttttataaattctaacttaaatgcccagaaaataactactcatactcacattgtcctctaattgaaaagataagtcaggttttttgtgtttttttttcattttaaaatcataatacgcaatgttttccacttgaacgctataccttgtgtattgtgcttgcttcagcctcgagcctctactgatgttccacctcaaggcgacaggaatgccacctggagaaactcctgggcggtatgggaagaaagccggtctcatcagagtatatttgcggggatcgacgaccaaggtgttaaattccaagcacgctttggaaagttctaggtgcttgggaagagatccgtaggcggcagggatgcccgcgccccggcgtcccagcgcggagggtggcggcggggcctggccctagcggggcggggcgggctcgggttaccgggagtcgcggggcgcggccggcactgcccgcggcgcctcctcctagagccgcacctggaggcagcgcgcgcgtcgaagaggcagcggctgtggagcgcggcggggcggctccgcccagggcagcccgggctgcgccggtggcaggtggaaaggcgagcggcatggagcgcgtaataagagagttggagtcggaaagagcagccccagtcgccggggaagcgggaggtcagtgcgggctccggcggcccccaggctccgagcgcccgcccgcggccccggcccggcccctagcccccgccgcccgcgcccgccccgggtcgcccctctggccccgggtccgagccatgcgtctctgagcgccccgagcgcgcccccgccccggaccgtgcccgggccccggcgcccccagcccggcgccgcccaccggtcgctagccaccatggctgaagcccctcctagaaggcttggactgggacctcctcctggggatgctcctagagctgaactggtggctctgacagccgtgcagtctgaacaaggcgaagctggtggcggcggatctccacgtagacttggactgctgggaagccctcttcctcctggtgctccacttcctggacctggcagtggatctggatctgcctgtggccagagaagctctgccgctcacaagagataccggcggctgcagaactgggtgtacaacgtgctggaaagacccagaggctgggccttcgtgtaccacgtgttcatctttctgctggtgttcagctgcctggtgctgtccgtgctgagcaccatccaagaacatcaagagctggctaacgagtgcctgttaatactggagtttgtgatgattgtggtgttcggcctcgagtacatcgtccgcgtttggagcgccggctgctgctgcagatatagaggttggcaaggcagattccgcttcgccagaaagcccttctgcgtgatcgacttcatcgtgttcgtggccagcgtggccgtgattgctgctggcacacagggcaacatcttcgccacaagcgccctgcggagcatgcggtttctgcagatcctgagaatggtccgaatggacagaagaggcggcacctggaagctgctgggctctgtggtgtacgcccacagcaaagagctgatcaccgcctggtacatcggatttctggtgctgatcttcgcctccttcctggtgtacctggccgagaaggacgccaacagcgactttagcagctacgccgactctctttggtggggcaccatcacactgaccaccatcggctacggcgacaagacccctcacacatggctgggaagagtgctggccgctggatttgctctgctgggcatcagctttttcgccctgcctgccggaatcctcggatctggctttgccctgaaggtgcaagagcagcaccggcagaagcacttcgagaagagaagaatgcctgccgccaacctgattcaggccgcttggagactgtacagcaccgacatgagcagagcctacctgaccgccacgtggtattattacgactcgatcctgcctagcttccgcgaactggccctgctgtttgagcatgtgcagagagccagaaacggcggcctcagacctctggaagttcggagagcacctgtgcctgatggcgccccttctagatatcctccagtggccacctgtcacagacccggcagcacatctttttgccctggcgagtctagccggatgggcatcaaggacagaatcagaatgggcagcagccagcggagaacaggcccttctaaacagcatctggcccctccaaccatgcctacaagccctagctctgagcaagtgggcgaagccacctctcctaccaaggtgcagaagtcctggtccttcaacgaccggaccagattcagagccagcctgagactgaagcccagaacctctgccgaggatgccccttctgaagaggtggccgaagagaagtcctaccagtgcgagctgaccgtggacgacatcatgccagccgtgaaaaccgtgatacggtctatccggatcctgaagttcctggtggccaagcggaagttcaaagagacactgcggccctacgacgtgaaggacgtgatcgagcagtattctgccggccacctggacatgctgggcagaatcaagagcctgcagaccagagtggaccagatcgttggaagaggcccaggcgacagaaaggccagagagaagggcgataagggcccatctgatgccgaggttgtcgacgagatatcaatgatgggcagagtggtcaaggtggaaaaacaggtgcagagcatcgagcacaagctggacctgctgctgggattctacagccggtgtctgagaagcggcacatctgcatctctgggcgctgtgcaggtcccactgttcgaccctgatatcaccagcgactatcacagccccgtggaccacgaggacatctccgtttctgctcagaccctgagcatcagcagatccgtgtccaccaacatggactaataagagctcgctgatcagcctcgactgtgccttctagttgccagccatctgttgtttgcccctcccccgtgccttccttgaccctggaaggtgccactcccactgtcctttcctaataaaatgaggaaattgcatcgcattgtctgagtaggtgtcattctattctggggggtggggtggggcaggacagcaagggggaggattgggaagacaatagcaggcatgctggggatgcggtgggctctatggttaattaaggtcgggcaggaagagggcctatttcccatgattccttcatatttgcatatacgatacaaggctgttagagagataattagaattaatttgactgtaaacacaaagatattagtacaaaatacgtgacgtagaaagtaataatttcttgggtagtttgcagttttaaaattatgttttaaaatggactatcatatgcttaccgtaacttgaaagtatttcgatttcttggctttatatatcttgtggaaaggacgaaacaccgaggagcaccaggaacttgccagtttaagtactctgtgctggaaacagcacagaatctacttaaacaaggcaaaatgccgtgtttatctcgtcaacttgttggcgagattttttcggaccgctaggaacccctagtgatggagttggccactccctctctgcgcgctcgctcgctcactgaggccgggcgaccaaaggtcgcccgacgcccgggctttgcccgggcggcctcagtgagcgagcgagcgcgcagctgcctgcagg

SEQ ID NO: 341 - DNA, 4726 bp, synthetic construct
  misc_feature 1..4726: note = Description of Artificial Sequence: Syntheticpolynucleotide
  source 1..4726: mol_type = other DNA
ctgcgcgctcgctcgctcactgaggccgcccgggcgtcgggcgacctttggtcgcccggcctcagtgagcgagcgagcgcgcagagagggagtggccaactccatcactaggggttcctgcggccgcacgcgtgtgcaatttatggtatagctgggaaacgtcaaagtcaagagttttgtaggaaagtcacgtcacttagccctgtctcctgtgccgggtgagacctgtgtgtgcacttggtgacaatggctttgagtctgtcaactccagactgaggtcagccttacacacccatagttcccaaagctgaaaacaggcctgcctccaacggtacctgctaatatcaggggagccttttcagcttacagagcaccctgtatgtgtttgtcttagttcaggccaccatctccaccttaccaggcatctagaaccttctccacactttgccaacagggttcgtttgcagaattgaaatcttagttaaggtttgttgaagtttgttgttgttttttttttttttttacaattggctgttcccacccacattcccttgagacataaatagaaaaaaaaaaaaaaagaggtttcatgagtaagacaagacatttgagctgcatccacttgatccttgaaaaggaaatctaagaggttgtaactatcactttttctagcctatataaggtaggtcagtaaggtagcaaaaacacatctgttgttttgctccttcaactctttttcctgattcttcctggggggaaaccgaaaacggtgagtaactggtggacacatcagaccccagactcttttcttcactgcatgcattcatattaggctcaggtgcttagactcctgttttccggtggctctgacacctggaaggattttaatctctgggagatgggcttttcatccatctgcttcccacctttcaggacaggtgcatgccttcttccacagaatgtctgcaagcagcccaaactgtatcctttcccacgtggaatttgcaacattgcatctctcgggctgctgtaggaaaatgccagtgcatgtgtaacatggtttacggctgcctatgcaaatgactgattatgtcagtataatttttataagaaaacaattgaatccttctttgggtcattttttttttccatttttggcatgtattcaaaagaaggctctgagacaaaaaaggctggggtgttttccgtatctggttttaatttggatattctgtcccgtcacttaatacaaaaccatgcttatcacattttaaaaattctagacaggcctggctcggtggcttgcatctgtcatcccagcactttgtgaggccaaggcaggcagatcacctgaggtcaggagctcaagaccagcctggccaacatggcaaaaccccgtctctactaaaaacacaaaaattagccaggcatggtagtgcgcacctgtaatcccagctactgggaaggcttaggcaggagaatcacttgagcccaggaggcggaggttgcggtgagccgagatcacgctcttgcactccagcctgggtgacagagtgagactccgtcttaatttaaaaaaaaaaataacgccggtggcaggtggaaaggcgagcggcatggagcgcgtaataagagagttggagtcggaaagagcagccccagtcgccggggaagcgggaggtcagtgcgggctccggcggcccccaggctccgagcgcccgcccgcggccccggcccggcccctagcccccgccgcccgcgcccgccccgggtcgcccctctggccccgggtccgagccatgcgtctctgagcgccccgagcgcgcccccgccccggaccgtgcccgggccccggcgcccccagcccggcgccgcccaccggtcgctagccaccatggctgaagcccctcctagaaggcttggactgggacctcctcctggggatgctcctagagctgaactggtggctctgacagccgtgcagtctgaacaaggcgaagctggtggcggcggatctccacgtagacttggactgctgggaagccctcttcctcctggtgctccacttcctggacctggcagtggatctggatctgcctgtggccagagaagctctgccgctcacaagagataccggcggctgcagaactgggtgtacaacgtgctggaaagacccagaggctgggccttcgtgtaccacgtgttcatctttctgctggtgttcagctgcctggtgctgtccgtgctgagcaccatccaagaacatcaagagctggctaacgagtgcctgttaatactggagtttgtgatgattgtggtgttcggcctcgagtacatcgtccgcgtttggagcgccggctgctgctgcagatatagaggttggcaaggcagattccgcttcgccagaaagcccttctgcgtgatcgacttcatcgtgttcgtggccagcgtggccgtgattgctgctggcacacagggcaacatcttcgccacaagcgccctgcggagcatgcggtttctgcagatcctgagaatggtccgaatggacagaagaggcggcacctggaagctgctgggctctgtggtgtacgcccacagcaaagagctgatcaccgcctggtacatcggatttctggtgctgatcttcgcctccttcctggtgtacctggccgagaaggacgccaacagcgactttagcagctacgccgactctctttggtggggcaccatcacactgaccaccatcggctacggcgacaagacccctcacacatggctgggaagagtgctggccgctggatttgctctgctgggcatcagctttttcgccctgcctgccggaatcctcggatctggctttgccctgaaggtgcaagagcagcatagacaaaagcattttgaaaagagaagaatgcctgccgccaacctgattcaggccgcttggagactgtacagcaccgacatgagcagagcctacctgaccgccacgtggtattattacgattcgatcctgcctagcttccgcgaactggccctgctgtttgagcatgtgcagagagccagaaacggcggcctcagacctctggaagttcggagagcacctgtgcctgatggcgccccttctagatatcctccagtggccacctgtcacagacccggcagcacatctttttgccctggcgagtctagccggatgggcatcaaggacagaatcagaatgggcagcagccagcggagaacaggcccttctaaacagcatctggcccctccaaccatgcctacaagccctagctctgagcaagtgggcgaagccacctctcctaccaaggtgcagaagtcctggtccttcaacgaccggaccagatttagagccagcctccggctgaagcccagaacctctgccgaggatgccccttctgaagaggtggccgaagagaagtcctaccagtgcgagctgaccgtggacgacatcatgccagccgtgaaaaccgtgataaggtctatacgcatcctgaagttcctggtggccaagcggaagttcaaagagacactgcggccctacgacgtgaaggacgtgatcgagcagtattctgccggccacctggacatgctgggcagaatcaagagcctgcagaccagagtggaccagatcgttggaagaggcccaggcgacagaaaggccagagagaagggcgataagggcccatctgatgccgaggttgtcgacgagatatcaatgatgggcagagtcgtgaaagtcgaaaaacaggtgcagagcatcgagcacaagctggacctgctgctgggattctacagccggtgtctgagaagcggcacatctgcatctctgggcgctgtgcaggtcccactgttcgatcctgatattacgagcgattatcacagccccgtggaccacgaggacatctccgtttctgctcagaccctgagcatcagcagatccgtgtccaccaacatggactaacctgcaggcgccggcggagcaggaggaccaaggccctggcgaaggccgtggcctcgatgctgtcatagtaataccagtgtgcaggtcccaatggctggtattaatgtgacagtctcggggacgcgcaattgggtggcctcgatgctgtcatagtaataccagtgtgcaggtcccaatggctggtattaatgtgacagtctcggggacgcgggcgcgcccgtggcctcgatgctgtcatagtaataccagtgtgcaggtcccaatggctggtattaatgtgacagtctcggggacgcgggcctggacgccggcatccgggctcaggacccccctcgagctcgctgatcagcctcgactgtgccttctagttgccagccatctgttgtttgcccctcccccgtgccttccttgaccctggaaggtgccactcccactgtcctttcctaataaaatgaggaaattgcatcgcattgtctgagtaggtgtcattctattctggggggtggggtggggcaggacagcaagggggaggattgggaagacaatagcaggcatgctggggatgcggtgggctctatggaagcttgaattcagctgacgtgcctcggaccgctaggaacccctagtgatggagttggccactccctctctgcgcgctcgctcgctcactgaggccgggcgaccaaaggtcgcccgacgcccgggctttgcccgggcggcctcagtgagcgagcgagcgcgcag

SEQ ID NO: 342 - DNA, 4727 bp, synthetic construct
  misc_feature 1..4727: note = Description of Artificial Sequence: Syntheticpolynucleotide
  source 1..4727: mol_type = other DNA
ctgcgcgctcgctcgctcactgaggccgcccgggcgtcgggcgacctttggtcgcccggcctcagtgagcgagcgagcgcgcagagagggagtggccaactccatcactaggggttcctgcggccgcacgcgtgtgcaatttatggtatagctgggaaacgtcaaagtcaagagttttgtaggaaagtcacgtcacttagccctgtctcctgtgccgggtgagacctgtgtgtgcacttggtgacaatggctttgagtctgtcaactccagactgaggtcagccttacacacccatagttcccaaagctgaaaacaggcctgcctccaacggtacctgctaatatcaggggagccttttcagcttacagagcaccctgtatgtgtttgtcttagttcaggccaccatctccaccttaccaggcatctagaaccttctccacactttgccaacagggttcgtttgcagaattgaaatcttagttaaggtttgttgaagtttgttgttgttttttttttttttttacaattggctgttcccacccacattcccttgagacataaatagaaaaaaaaaaaaaaagaggtttcatgagtaagacaagacatttgagctgcatccacttgatccttgaaaaggaaatctaagaggttgtaactatcactttttctagcctatataaggtaggtcagtaaggtagcaaaaacacatctgttgttttgctccttcaactctttttcctgattcttcctggggggaaaccgaaaacggtgagtaactggtggacacatcagaccccagactcttttcttcactgcatgcattcatattaggctcaggtgcttagactcctgttttccggtggctctgacacctggaaggattttaatctctgggagatgggcttttcatccatctgcttcccacctttcaggacaggtgcatgccttcttccacagaatgtctgcaagcagcccaaactgtatcctttcccacgtggaatttgcaacattgcatctctcgggctgctgtaggaaaatgccagtgcatgtgtaacatggtttacggctgcctatgcaaatgactgattatgtcagtataatttttataagaaaacaattgaatccttctttgggtcattttttttttccatttttggcatgtattcaaaagaaggctctgagacaaaaaaggctggggtgttttccgtatctggttttaatttggatattctgtcccgtcacttaatacaaaaccatgcttatcacattttaaaaattctagacaggcctggctcggtggcttgcatctgtcatcccagcactttgtgaggccaaggcaggcagatcacctgaggtcaggagctcaagaccagcctggccaacatggcaaaaccccgtctctactaaaaacacaaaaattagccaggcatggtagtgcgcacctgtaatcccagctactgggaaggcttaggcaggagaatcacttgagcccaggaggcggaggttgcggtgagccgagatcacgctcttgcactccagcctgggtgacagagtgagactccgtcttaatttaaaaaaaaaaataacgccggtggcaggtggaaaggcgagcggcatggagcgcgtaataagagagttggagtcggaaagagcagccccagtcgccggggaagcgggaggtcagtgcgggctccggcggcccccaggctccgagcgcccgcccgcggccccggcccggcccctagcccccgccgcccgcgcccgccccgggtcgcccctctggccccgggtccgagccatgcgtctctgagcgccccgagcgcgcccccgccccggaccgtgcccgggccccggcgcccccagcccggcgccgcccaccggtcgctagccaccatggctgaagcccctcctagaaggcttggactgggacctcctcctggggatgctcctagagctgaactggtggctctgacagccgtgcagtctgaacaaggcgaagctggtggcggcggatctccacgtagacttggactgctgggaagccctcttcctcctggtgctccacttcctggacctggcagtggatctggatctgcctgtggccagagaagctctgccgctcacaagagataccggcggctgcagaactgggtgtacaacgtgctggaaagacccagaggctgggccttcgtgtaccacgtgttcatctttctgctggtgttcagctgcctggtgctgtccgtgctgagcaccatccaagaacatcaagagctggctaacgagtgcctgttaatactggagtttgtgatgattgtggtgttcggcctcgagtacatcgtccgcgtttggagcgccggctgctgctgcagatatagaggttggcaaggcagattccgcttcgccagaaagcccttctgcgtgatcgacttcatcgtgttcgtggccagcgtggccgtgattgctgctggcacacagggcaacatcttcgccacaagcgccctgcggagcatgcggtttctgcagatcctgagaatggtccgaatggacagaagaggcggcacctggaagctgctgggctctgtggtgtacgcccacagcaaagagctgatcaccgcctggtacatcggatttctggtgctgatcttcgcctccttcctggtgtacctggccgagaaggacgccaacagcgactttagcagctacgccgactctctttggtggggcaccatcacactgaccaccatcggctacggcgacaagacccctcacacatggctgggaagagtgctggccgctggatttgctctgctgggcatcagctttttcgccctgcctgccggaatcctcggatctggctttgccctgaaggtgcaagagcagcatagacaaaagcattttgaaaagagaagaatgcctgccgccaacctgattcaggccgcttggagactgtacagcaccgacatgagcagagcctacctgaccgccacgtggtattattacgattcgatcctgcctagcttccgcgaactggccctgctgtttgagcatgtgcagagagccagaaacggcggcctcagacctctggaagttcggagagcacctgtgcctgatggcgccccttctagatatcctccagtggccacctgtcacagacccggcagcacatctttttgccctggcgagtctagccggatgggcatcaaggacagaatcagaatgggcagcagccagcggagaacaggcccttctaaacagcatctggcccctccaaccatgcctacaagccctagctctgagcaagtgggcgaagccacctctcctaccaaggtgcagaagtcctggtccttcaacgaccggaccagatttagagccagcctccggctgaagcccagaacctctgccgaggatgccccttctgaagaggtggccgaagagaagtcctaccagtgcgagctgaccgtggacgacatcatgccagccgtgaaaaccgtgataaggtctatacgcatcctgaagttcctggtggccaagcggaagttcaaagagacactgcggccctacgacgtgaaggacgtgatcgagcagtattctgccggccacctggacatgctgggcagaatcaagagcctgcagaccagagtggaccagatcgttggaagaggcccaggcgacagaaaggccagagagaagggcgataagggcccatctgatgccgaggttgtcgacgagatatcaatgatgggcagagtcgtgaaagtcgaaaaacaggtgcagagcatcgagcacaagctggacctgctgctgggattctacagccggtgtctgagaagcggcacatctgcatctctgggcgctgtgcaggtcccactgttcgatcctgatattacgagcgattatcacagccccgtggaccacgaggacatctccgtttctgctcagaccctgagcatcagcagatccgtgtccaccaacatggactaacctgcaggcgccggcggagcaggaggaccaaggccctggcgaaggccgtggcctcgttgagtcttagagaggcccggtgtgcaggtcccaatggccgggtcttactgagattccacggggacgcgggatccggtggcctcgttgagtcttagagaggcccggtgtgcaggtcccaatggccgggtcttactgagattccacggggacgcgggtacccgtggcctcgttgagtcttagagaggcccggtgtgcaggtcccaatggccgggtcttactgagattccacggggacgcgggcctggacgccggcatccgggctcaggacccccctcctcgagctcgctgatcagcctcgactgtgccttctagttgccagccatctgttgtttgcccctcccccgtgccttccttgaccctggaaggtgccactcccactgtcctttcctaataaaatgaggaaattgcatcgcattgtctgagtaggtgtcattctattctggggggtggggtggggcaggacagcaagggggaggattgggaagacaatagcaggcatgctggggatgcggtgggctctatggaagcttgaattcagctgacgtgcctcggaccgctaggaacccctagtgatggagttggccactccctctctgcgcgctcgctcgctcactgaggccgggcgaccaaaggtcgcccgacgcccgggctttgcccgggcggcctcagtgagcgagcgagcgcgcag

SEQ ID NO: 343 - DNA, 4783 bp, synthetic construct
  misc_feature 1..4783: note = Description of Artificial Sequence: Syntheticpolynucleotide
  source 1..4783: mol_type = other DNA
ctgcgcgctcgctcgctcactgaggccgcccgggcgtcgggcgacctttggtcgcccggcctcagtgagcgagcgagcgcgcagagagggagtggccaactccatcactaggggttcctgcggccgcacgcgtaaagcaaactcatctctaaaccagaaataatagcaatatctatacaagtaaatacatgtactcagaacagtgcctactacatgtaaacactgaacaggtgttagcaacattgccattattgtgttagtatattaggtacctggtgctaccggcaaaaccagtttatcatccaactgtctccagtgttgctactcaaagtttggtcctccagtagcctatcaggatcacccaggggcctgttagaaaggcacatctcagaccccaccccagacctactgaatcagaatctgcgtttttaacgggatccgcaggtgattcctatgcacattaaagtgtaagaagtactgggctacagacaggtatgtgacaaaataatttcataggatggcaaaggccaagtggcaaatgaaggacaccagaaatgcacgtcccaggagcccaactcctccttagtaaattaccctattaagatttgtttagagatgttcaaaagcgtggagaaaagcaaatttggtttccctggtgcccttgaagagatcgccctcgtgtggagtagggagggaatctctagcctttcctctcggatgaagaacagcaccagcgctcccagccaaaggcctggcccaggttctggaggtggggtctccttggcagaagcctctggtgtctgcaggcgtgcatttacagctttaagaccaaacagctagtccgccacgtgtcactacagtgtgcacgcgcagaaatgcacaaagcaaaaaaaaaaaaaaagatgctcttaatgaaccaactataatccttgctaaggcataaagccagagggaagtatgtatctgaaatcattttctacccctcaccctcttggagcccggcactctggctgcggtgctctcttgtatcccagttgctagatgcaaaacaagctatttcctatctaattttttttttgttttataaattctaacttaaatgcccagaaaataactactcatactcacattgtcctctaattgaaaagataagtcaggttttttgtgtttttttttcattttaaaatcataatacgcaatgttttccacttgaacgctataccttgtgtattgtgcttgcttcagcctcgagcctctactgatgttccacctcaaggcgacaggaatgccacctggagaaactcctgggcggtatgggaagaaagccggtctcatcagagtatatttgcggggatcgacgaccaaggtgttaaattccaagcacgctttggaaagttctaggtgcttgggaagagatccgtaggcggcagggatgcccgcgccccggcgtcccagcgcggagggtggcggcggggcctggccctagcggggcggggcgggctcgggttaccgggagtcgcggggcgcggccggcactgcccgcggcgcctcctcctagagccgcacctggaggcagcgcgcgcgtcgaagaggcagcggctgtggagcgcggcggggcggctccgcccagggcagcccgggctgcgccggtggcaggtggaaaggcgagcggcatggagcgcgtaataagagagttggagtcggaaagagcagccccagtcgccggggaagcgggaggtcagtgcgggctccggcggcccccaggctccgagcgcccgcccgcggccccggcccggcccctagcccccgccgcccgcgcccgccccgggtcgcccctctggccccgggtccgagccatgcgtctctgagcgccccgagcgcgcccccgccccggaccgtgcccgggccccggcgcccccagcccggcgccgcccaccggtcgctagccaccatggctgaagcccctcctagaaggcttggactgggacctcctcctggggatgctcctagagctgaactggtggctctgacagccgtgcagtctgaacaaggcgaagctggtggcggcggatctccacgtagacttggactgctgggaagccctcttcctcctggtgctccacttcctggacctggcagtggatctggatctgcctgtggccagagaagctctgccgctcacaagagataccggcggctgcagaactgggtgtacaacgtgctggaaagacccagaggctgggccttcgtgtaccacgtgttcatctttctgctggtgttcagctgcctggtgctgtccgtgctgagcaccatccaagaacatcaagagctggctaacgagtgcctgttaatactggagtttgtgatgattgtggtgttcggcctcgagtacatcgtccgcgtttggagcgccggctgctgctgcagatatagaggttggcaaggcagattccgcttcgccagaaagcccttctgcgtgatcgacttcatcgtgttcgtggccagcgtggccgtgattgctgctggcacacagggcaacatcttcgccacaagcgccctgcggagcatgcggtttctgcagatcctgagaatggtccgaatggacagaagaggcggcacctggaagctgctgggctctgtggtgtacgcccacagcaaagagctgatcaccgcctggtacatcggatttctggtgctgatcttcgcctccttcctggtgtacctggccgagaaggacgccaacagcgactttagcagctacgccgactctctttggtggggcaccatcacactgaccaccatcggctacggcgacaagacccctcacacatggctgggaagagtgctggccgctggatttgctctgctgggcatcagctttttcgccctgcctgccggaatcctcggatctggctttgccctgaaggtgcaagagcagcatagacaaaagcattttgaaaagagaagaatgcctgccgccaacctgattcaggccgcttggagactgtacagcaccgacatgagcagagcctacctgaccgccacgtggtattattacgattcgatcctgcctagcttccgcgaactggccctgctgtttgagcatgtgcagagagccagaaacggcggcctcagacctctggaagttcggagagcacctgtgcctgatggcgccccttctagatatcctccagtggccacctgtcacagacccggcagcacatctttttgccctggcgagtctagccggatgggcatcaaggacagaatcagaatgggcagcagccagcggagaacaggcccttctaaacagcatctggcccctccaaccatgcctacaagccctagctctgagcaagtgggcgaagccacctctcctaccaaggtgcagaagtcctggtccttcaacgaccggaccagatttagagccagcctccggctgaagcccagaacctctgccgaggatgccccttctgaagaggtggccgaagagaagtcctaccagtgcgagctgaccgtggacgacatcatgccagccgtgaaaaccgtgataaggtctatacgcatcctgaagttcctggtggccaagcggaagttcaaagagacactgcggccctacgacgtgaaggacgtgatcgagcagtattctgccggccacctggacatgctgggcagaatcaagagcctgcagaccagagtggaccagatcgttggaagaggcccaggcgacagaaaggccagagagaagggcgataagggcccatctgatgccgaggttgtcgacgagatatcaatgatgggcagagtcgtgaaagtcgaaaaacaggtgcagagcatcgagcacaagctggacctgctgctgggattctacagccggtgtctgagaagcggcacatctgcatctctgggcgctgtgcaggtcccactgttcgatcctgatattacgagcgattatcacagccccgtggaccacgaggacatctccgtttctgctcagaccctgagcatcagcagatccgtgtccaccaacatggactaacctgcaggcgccggcggagcaggaggaccaaggccctggcgaaggccgtggcctcgatgctgtcatagtaataccagtgtgcaggtcccaatggctggtattaatgtgacagtctcggggacgcgcaattgggtggcctcgatgctgtcatagtaataccagtgtgcaggtcccaatggctggtattaatgtgacagtctcggggacgcgggcgcgcccgtggcctcgatgctgtcatagtaataccagtgtgcaggtcccaatggctggtattaatgtgacagtctcggggacgcgggcctggacgccggcatccgggctcaggacccccctcgagctcgctgatcagcctcgactgtgccttctagttgccagccatctgttgtttgcccctcccccgtgccttccttgaccctggaaggtgccactcccactgtcctttcctaataaaatgaggaaattgcatcgcattgtctgagtaggtgtcattctattctggggggtggggtggggcaggacagcaagggggaggattgggaagacaatagcaggcatgctggggatgcggtgggctctatggaagcttgaattcagctgacgtgcctcggaccgctaggaacccctagtgatggagttggccactccctctctgcgcgctcgctcgctcactgaggccgggcgaccaaaggtcgcccgacgcccgggctttgcccgggcggcctcagtgagcgagcgagcgcgcag

SEQ ID NO: 344 - DNA, 4784 bp, synthetic construct
  misc_feature 1..4784: note = Description of Artificial Sequence: Syntheticpolynucleotide
  source 1..4784: mol_type = other DNA
ctgcgcgctcgctcgctcactgaggccgcccgggcgtcgggcgacctttggtcgcccggcctcagtgagcgagcgagcgcgcagagagggagtggccaactccatcactaggggttcctgcggccgcacgcgtaaagcaaactcatctctaaaccagaaataatagcaatatctatacaagtaaatacatgtactcagaacagtgcctactacatgtaaacactgaacaggtgttagcaacattgccattattgtgttagtatattaggtacctggtgctaccggcaaaaccagtttatcatccaactgtctccagtgttgctactcaaagtttggtcctccagtagcctatcaggatcacccaggggcctgttagaaaggcacatctcagaccccaccccagacctactgaatcagaatctgcgtttttaacgggatccgcaggtgattcctatgcacattaaagtgtaagaagtactgggctacagacaggtatgtgacaaaataatttcataggatggcaaaggccaagtggcaaatgaaggacaccagaaatgcacgtcccaggagcccaactcctccttagtaaattaccctattaagatttgtttagagatgttcaaaagcgtggagaaaagcaaatttggtttccctggtgcccttgaagagatcgccctcgtgtggagtagggagggaatctctagcctttcctctcggatgaagaacagcaccagcgctcccagccaaaggcctggcccaggttctggaggtggggtctccttggcagaagcctctggtgtctgcaggcgtgcatttacagctttaagaccaaacagctagtccgccacgtgtcactacagtgtgcacgcgcagaaatgcacaaagcaaaaaaaaaaaaaaagatgctcttaatgaaccaactataatccttgctaaggcataaagccagagggaagtatgtatctgaaatcattttctacccctcaccctcttggagcccggcactctggctgcggtgctctcttgtatcccagttgctagatgcaaaacaagctatttcctatctaattttttttttgttttataaattctaacttaaatgcccagaaaataactactcatactcacattgtcctctaattgaaaagataagtcaggttttttgtgtttttttttcattttaaaatcataatacgcaatgttttccacttgaacgctataccttgtgtattgtgcttgcttcagcctcgagcctctactgatgttccacctcaaggcgacaggaatgccacctggagaaactcctgggcggtatgggaagaaagccggtctcatcagagtatatttgcggggatcgacgaccaaggtgttaaattccaagcacgctttggaaagttctaggtgcttgggaagagatccgtaggcggcagggatgcccgcgccccggcgtcccagcgcggagggtggcggcggggcctggccctagcggggcggggcgggctcgggttaccgggagtcgcggggcgcggccggcactgcccgcggcgcctcctcctagagccgcacctggaggcagcgcgcgcgtcgaagaggcagcggctgtggagcgcggcggggcggctccgcccagggcagcccgggctgcgccggtggcaggtggaaaggcgagcggcatggagcgcgtaataagagagttggagtcggaaagagcagccccagtcgccggggaagcgggaggtcagtgcgggctccggcggcccccaggctccgagcgcccgcccgcggccccggcccggcccctagcccccgccgcccgcgcccgccccgggtcgcccctctggccccgggtccgagccatgcgtctctgagcgccccgagcgcgcccccgccccggaccgtgcccgggccccggcgcccccagcccggcgccgcccaccggtcgctagccaccatggctgaagcccctcctagaaggcttggactgggacctcctcctggggatgctcctagagctgaactggtggctctgacagccgtgcagtctgaacaaggcgaagctggtggcggcggatctccacgtagacttggactgctgggaagccctcttcctcctggtgctccacttcctggacctggcagtggatctggatctgcctgtggccagagaagctctgccgctcacaagagataccggcggctgcagaactgggtgtacaacgtgctggaaagacccagaggctgggccttcgtgtaccacgtgttcatctttctgctggtgttcagctgcctggtgctgtccgtgctgagcaccatccaagaacatcaagagctggctaacgagtgcctgttaatactggagtttgtgatgattgtggtgttcggcctcgagtacatcgtccgcgtttggagcgccggctgctgctgcagatatagaggttggcaaggcagattccgcttcgccagaaagcccttctgcgtgatcgacttcatcgtgttcgtggccagcgtggccgtgattgctgctggcacacagggcaacatcttcgccacaagcgccctgcggagcatgcggtttctgcagatcctgagaatggtccgaatggacagaagaggcggcacctggaagctgctgggctctgtggtgtacgcccacagcaaagagctgatcaccgcctggtacatcggatttctggtgctgatcttcgcctccttcctggtgtacctggccgagaaggacgccaacagcgactttagcagctacgccgactctctttggtggggcaccatcacactgaccaccatcggctacggcgacaagacccctcacacatggctgggaagagtgctggccgctggatttgctctgctgggcatcagctttttcgccctgcctgccggaatcctcggatctggctttgccctgaaggtgcaagagcagcatagacaaaagcattttgaaaagagaagaatgcctgccgccaacctgattcaggccgcttggagactgtacagcaccgacatgagcagagcctacctgaccgccacgtggtattattacgattcgatcctgcctagcttccgcgaactggccctgctgtttgagcatgtgcagagagccagaaacggcggcctcagacctctggaagttcggagagcacctgtgcctgatggcgccccttctagatatcctccagtggccacctgtcacagacccggcagcacatctttttgccctggcgagtctagccggatgggcatcaaggacagaatcagaatgggcagcagccagcggagaacaggcccttctaaacagcatctggcccctccaaccatgcctacaagccctagctctgagcaagtgggcgaagccacctctcctaccaaggtgcagaagtcctggtccttcaacgaccggaccagatttagagccagcctccggctgaagcccagaacctctgccgaggatgccccttctgaagaggtggccgaagagaagtcctaccagtgcgagctgaccgtggacgacatcatgccagccgtgaaaaccgtgataaggtctatacgcatcctgaagttcctggtggccaagcggaagttcaaagagacactgcggccctacgacgtgaaggacgtgatcgagcagtattctgccggccacctggacatgctgggcagaatcaagagcctgcagaccagagtggaccagatcgttggaagaggcccaggcgacagaaaggccagagagaagggcgataagggcccatctgatgccgaggttgtcgacgagatatcaatgatgggcagagtcgtgaaagtcgaaaaacaggtgcagagcatcgagcacaagctggacctgctgctgggattctacagccggtgtctgagaagcggcacatctgcatctctgggcgctgtgcaggtcccactgttcgatcctgatattacgagcgattatcacagccccgtggaccacgaggacatctccgtttctgctcagaccctgagcatcagcagatccgtgtccaccaacatggactaacctgcaggcgccggcggagcaggaggaccaaggccctggcgaaggccgtggcctcgttgagtcttagagaggcccggtgtgcaggtcccaatggccgggtcttactgagattccacggggacgcgggatccggtggcctcgttgagtcttagagaggcccggtgtgcaggtcccaatggccgggtcttactgagattccacggggacgcgggtacccgtggcctcgttgagtcttagagaggcccggtgtgcaggtcccaatggccgggtcttactgagattccacggggacgcgggcctggacgccggcatccgggctcaggacccccctcctcgagctcgctgatcagcctcgactgtgccttctagttgccagccatctgttgtttgcccctcccccgtgccttccttgaccctggaaggtgccactcccactgtcctttcctaataaaatgaggaaattgcatcgcattgtctgagtaggtgtcattctattctggggggtggggtggggcaggacagcaagggggaggattgggaagacaatagcaggcatgctggggatgcggtgggctctatggaagcttgaattcagctgacgtgcctcggaccgctaggaacccctagtgatggagttggccactccctctctgcgcgctcgctcgctcactgaggccgggcgaccaaaggtcgcccgacgcccgggctttgcccgggcggcctcagtgagcgagcgagcgcgcag

SEQ ID NO: 345 - DNA, 3761 bp, synthetic construct
  misc_feature 1..3761: note = Description of Artificial Sequence: Syntheticpolynucleotide
  source 1..3761: mol_type = other DNA
cctgcaggcagctgcgcgctcgctcgctcactgaggccgcccgggcgtcgggcgacctttggtcgcccggcctcagtgagcgagcgagcgcgcagagagggagtggccaactccatcactaggggttcctgcggccgcacgcgtttcagatgccatcattaatgagaactatgactacctgaaggggttcttggaagacctggcaaggaactccccttggattaattggcttctctgcttctttgtaggtggattgctcaggtaatgacctggagcagttacacatcaaagtgacttcactgtgcagtcggatagagcagattcagtgtctggtattggctttccctttgtatttttgaatagaatataccattcaaagcctcctcgctcttctactatagtggttttgtttttaaaccctgagtgacgcttcacctttctaaatcagattcccttttgtaaaggggataatgattgctgatgttacttcacacagggctattttcaagaggaatcaattgagtagcatgagtactattccagatcttattttgatctgtcaagctgaagatgtgagcaaattccaattaagattagaccaaagacttctgagactttcaggaattcagggatgagaaagcagagtgggtcagctctgttgtctggaacttccatttaacttagatgcctcaggataggggttactcagctggaatcccctccactactgactcactatgtgaacctgagtgagtcacaaaacatagttggacttccagcaaagaacacctgacctggtttccttaccagaggaatgtttcagaaagtgagtatgctatagaaatggttagctcttagcagtgttcggaattgtgggccaggagcgccggtggcaggtggaaaggcgagcggcatggagcgcgtaataagagagttggagtcggaaagagcagccccagtcgccggggaagcgggaggtcagtgcgggctccggcggcccccaggctccgagcgcccgcccgcggccccggcccggcccctagcccccgccgcccgcgcccgccccgggtcgcccctctggccccgggtccgagccatgcgtctctgagcgccccgagcgcgcccccgccccggaccgtgcccgggccccggcgcccccagcccggcgccgcccaccggtcgctagccaccatggctgaagcccctcctagaaggcttggactgggacctcctcctggggatgctcctagagctgaactggtggctctgacagccgtgcagtctgaacaaggcgaagctggtggcggcggatctccacgtagacttggactgctgggaagccctcttcctcctggtgctccacttcctggacctggcagtggatctggatctgcctgtggccagagaagctctgccgctcacaagagataccggcggctgcagaactgggtgtacaacgtgctggaaagacccagaggctgggccttcgtgtaccacgtgttcatctttctgctggtgttcagctgcctggtgctgtccgtgctgagcaccatccaagaacatcaagagctggctaacgagtgcctgttaatactggagtttgtgatgattgtggtgttcggcctcgagtacatcgtccgcgtttggagcgccggctgctgctgcagatatagaggttggcaaggcagattccgcttcgccagaaagcccttctgcgtgatcgacttcatcgtgttcgtggccagcgtggccgtgattgctgctggcacacagggcaacatcttcgccacaagcgccctgcggagcatgcggtttctgcagatcctgagaatggtccgaatggacagaagaggcggcacctggaagctgctgggctctgtggtgtacgcccacagcaaagagctgatcaccgcctggtacatcggatttctggtgctgatcttcgcctccttcctggtgtacctggccgagaaggacgccaacagcgactttagcagctacgccgactctctttggtggggcaccatcacactgaccaccatcggctacggcgacaagacccctcacacatggctgggaagagtgctggccgctggatttgctctgctgggcatcagctttttcgccctgcctgccggaatcctcggatctggctttgccctgaaggtgcaagagcagcaccggcagaagcacttcgagaagagaagaatgcctgccgccaacctgattcaggccgcttggagactgtacagcaccgacatgagcagagcctacctgaccgccacgtggtattattacgactcgatcctgcctagcttccgcgaactggccctgctgtttgagcatgtgcagagagccagaaacggcggcctcagacctctggaagttcggagagcacctgtgcctgatggcgccccttctagatatcctccagtggccacctgtcacagacccggcagcacatctttttgccctggcgagtctagccggatgggcatcaaggacagaatcagaatgggcagcagccagcggagaacaggcccttctaaacagcatctggcccctccaaccatgcctacaagccctagctctgagcaagtgggcgaagccacctctcctaccaaggtgcagaagtcctggtccttcaacgaccggaccagattcagagccagcctgagactgaagcccagaacctctgccgaggatgccccttctgaagaggtggccgaagagaagtcctaccagtgcgagctgaccgtggacgacatcatgccagccgtgaaaaccgtgatacggtctatccggatcctgaagttcctggtggccaagcggaagttcaaagagacactgcggccctacgacgtgaaggacgtgatcgagcagtattctgccggccacctggacatgctgggcagaatcaagagcctgcagaccagagtggaccagatcgttggaagaggcccaggcgacagaaaggccagagagaagggcgataagggcccatctgatgccgaggttgtcgacgagatatcaatgatgggcagagtggtcaaggtggaaaaacaggtgcagagcatcgagcacaagctggacctgctgctgggattctacagccggtgtctgagaagcggcacatctgcatctctgggcgctgtgcaggtcccactgttcgaccctgatatcaccagcgactatcacagccccgtggaccacgaggacatctccgtttctgctcagaccctgagcatcagcagatccgtgtccaccaacatggacggatcccgggctgactacaaagaccatgacggtgattataaagatcatgacatcgactacaaggatgacgatgacaagtaataagagctcgctgatcagcctcgactgtgccttctagttgccagccatctgttgtttgcccctcccccgtgccttccttgaccctggaaggtgccactcccactgtcctttcctaataaaatgaggaaattgcatcgcattgtctgagtaggtgtcattctattctggggggtggggtggggcaggacagcaagggggaggattgggaagacaatagcaggcatgctggggatgcggtgggctctatgttaattcggaccgctaggaacccctagtgatggagttggccactccctctctgcgcgctcgctcgctcactgaggccgggcgaccaaaggtcgcccgacgcccgggctttgcccgggcggcctcagtgagcgagcgagcgcgcagctgcctgcagg

SEQ ID NO: 346 - DNA, 3939 bp, synthetic construct
  misc_feature 1..3939: note = Description of Artificial Sequence: Syntheticpolynucleotide
  source 1..3939: mol_type = other DNA
cctgcaggcagctgcgcgctcgctcgctcactgaggccgcccgggcgtcgggcgacctttggtcgcccggcctcagtgagcgagcgagcgcgcagagagggagtggccaactccatcactaggggttcctgcggccgcacgcgtccttgattcagagttaaagctatgggaaagtcctcaggcagaggacaaacattagacaagaaaatgcccatatatgaaaccctgcgaagcatcagtatttgaggagcagactaaaaaggaaccgtctgtggaggctaagagaagcatggccatttatctttgtgtcccgatcatcaggcacaggaccccacacacagtcacttctcaatgtgctaaatttcacagaatgcgtccagggtacctggttctggatagatccggtagaaggagatagaccgggagggcaaatggcatgaggagtctcacaggccagagtgattaaaggggtgtatcggggcggtaaaccctacagactctacctgtgcttatgcggggctggggaggacgagtcattacagatgaagaattaagtaaggtcagaccactcagggccttagatggatgtcacattgaagaatttagactccaacaggcctgccaccctgggaggagtcatcgcggattctggagaagggcgtgacagaggagatttcctttcgggaagtgtagtctggcagcggtgccccggtggtggcggcggcggtgctgctgttgctggtgatcgtgtggtggtgttagcggcgatagtgctttccactgggctttggcttggtagccgctgaaagagaacaacgctgccgctgctgctgatttcatgccatttcctgacccggcgctgtaacttggcctctgagccttggccacagaacgcagaggccgtggcatctggccgcagctgggctgcagtgcgtgcgcgcctggcctggtggtccgatgggaagcccggggcggggcagccgcggggcgggggcggggcgtcgcggagataggccacgcccctgcccgcccgcgcaggcgcgctgcgggtcgttagctgtccgccggtggcaggtggaaaggcgagcggcatggagcgcgtaataagagagttggagtcggaaagagcagccccagtcgccggggaagcgggaggtcagtgcgggctccggcggcccccaggctccgagcgcccgcccgcggccccggcccggcccctagcccccgccgcccgcgcccgccccgggtcgcccctctggccccgggtccgagccatgcgtctctgagcgccccgagcgcgcccccgccccggaccgtgcccgggccccggcgcccccagcccggcgccgcccaccggtcgctagccaccatggctgaagcccctcctagaaggcttggactgggacctcctcctggggatgctcctagagctgaactggtggctctgacagccgtgcagtctgaacaaggcgaagctggtggcggcggatctccacgtagacttggactgctgggaagccctcttcctcctggtgctccacttcctggacctggcagtggatctggatctgcctgtggccagagaagctctgccgctcacaagagataccggcggctgcagaactgggtgtacaacgtgctggaaagacccagaggctgggccttcgtgtaccacgtgttcatctttctgctggtgttcagctgcctggtgctgtccgtgctgagcaccatccaagaacatcaagagctggctaacgagtgcctgttaatactggagtttgtgatgattgtggtgttcggcctcgagtacatcgtccgcgtttggagcgccggctgctgctgcagatatagaggttggcaaggcagattccgcttcgccagaaagcccttctgcgtgatcgacttcatcgtgttcgtggccagcgtggccgtgattgctgctggcacacagggcaacatcttcgccacaagcgccctgcggagcatgcggtttctgcagatcctgagaatggtccgaatggacagaagaggcggcacctggaagctgctgggctctgtggtgtacgcccacagcaaagagctgatcaccgcctggtacatcggatttctggtgctgatcttcgcctccttcctggtgtacctggccgagaaggacgccaacagcgactttagcagctacgccgactctctttggtggggcaccatcacactgaccaccatcggctacggcgacaagacccctcacacatggctgggaagagtgctggccgctggatttgctctgctgggcatcagctttttcgccctgcctgccggaatcctcggatctggctttgccctgaaggtgcaagagcagcaccggcagaagcacttcgagaagagaagaatgcctgccgccaacctgattcaggccgcttggagactgtacagcaccgacatgagcagagcctacctgaccgccacgtggtattattacgactcgatcctgcctagcttccgcgaactggccctgctgtttgagcatgtgcagagagccagaaacggcggcctcagacctctggaagttcggagagcacctgtgcctgatggcgccccttctagatatcctccagtggccacctgtcacagacccggcagcacatctttttgccctggcgagtctagccggatgggcatcaaggacagaatcagaatgggcagcagccagcggagaacaggcccttctaaacagcatctggcccctccaaccatgcctacaagccctagctctgagcaagtgggcgaagccacctctcctaccaaggtgcagaagtcctggtccttcaacgaccggaccagattcagagccagcctgagactgaagcccagaacctctgccgaggatgccccttctgaagaggtggccgaagagaagtcctaccagtgcgagctgaccgtggacgacatcatgccagccgtgaaaaccgtgatacggtctatccggatcctgaagttcctggtggccaagcggaagttcaaagagacactgcggccctacgacgtgaaggacgtgatcgagcagtattctgccggccacctggacatgctgggcagaatcaagagcctgcagaccagagtggaccagatcgttggaagaggcccaggcgacagaaaggccagagagaagggcgataagggcccatctgatgccgaggttgtcgacgagatatcaatgatgggcagagtggtcaaggtggaaaaacaggtgcagagcatcgagcacaagctggacctgctgctgggattctacagccggtgtctgagaagcggcacatctgcatctctgggcgctgtgcaggtcccactgttcgaccctgatatcaccagcgactatcacagccccgtggaccacgaggacatctccgtttctgctcagaccctgagcatcagcagatccgtgtccaccaacatggacggatcccgggctgactacaaagaccatgacggtgattataaagatcatgacatcgactacaaggatgacgatgacaagtaataagagctcgctgatcagcctcgactgtgccttctagttgccagccatctgttgtttgcccctcccccgtgccttccttgaccctggaaggtgccactcccactgtcctttcctaataaaatgaggaaattgcatcgcattgtctgagtaggtgtcattctattctggggggtggggtggggcaggacagcaagggggaggattgggaagacaatagcaggcatgctggggatgcggtgggctctatgttaattcggaccgctaggaacccctagtgatggagttggccactccctctctgcgcgctcgctcgctcactgaggccgggcgaccaaaggtcgcccgacgcccgggctttgcccgggcggcctcagtgagcgagcgagcgcgcagctgcctgcagg

SEQ ID NO: 347 - DNA, 4652 bp, synthetic construct
  misc_feature 1..4652: note = Description of Artificial Sequence: Syntheticpolynucleotide
  source 1..4652: mol_type = other DNA
cctgcaggcagctgcgcgctcgctcgctcactgaggccgcccgggcgtcgggcgacctttggtcgcccggcctcagtgagcgagcgagcgcgcagagagggagtggccaactccatcactaggggttcctgcggccgcacgcgttttctcctaattcagcacaaaaattgagttccttttctgtagctaaagagcttgtatgaactgtcagcttagctaaccatatgttttcaatgttccctgcaaattgtttaaggtatgtatagtcctttcaatggatgagtaagtcttttgtcattgttatttgctgcctgtggacttgatttcaaaatcttcttcaggtcatgaataaatttccttttccttctgtccctacttttgagccaaggaacaaatcaagattcttcctcagagtgtacacaccttcccaggcatctcactctctcctcactctatctgcttcaagttatggctcgttggtgagaacactctgctgctgaggttattatttagctataataactttttctaactagacagaaacaaattagatatgccaggattttctaattacctgccttaagtgcttttttagaaagcattaataaatcatgtggatcttttcctagcagtggtaagataagttataatattatcaaactgtcagttttgccacttcaatatatgtatgcctggttgtaacctcacttaataagttaagtccatgtaaaaatagttgatagttaataaattgggcaagagttgcttaaacagattagactatataacaaaattagggttttaaaagaataaagctgctataacagtacgcttcatctcacaggaattaatcagttatggtatctccacaaaacagaatatcacgtattgttgaagagagccgtctcatttccccggggttggtttaatttctaatcaaactctgaaggggcctttgggcttcagaaaatttaaaactatagaattaccttgttctttcctcgggccaattaactgggcagattctttgcattccatttgaagcttactagctcctgcattttagctaaagtttcgtttctcgctcagcagttgaaaacctatctccttgtgcagcagaaaccaagtatgaacctcaggcatattgagctgaacggcccttggcgccatccccaaacgctgatgtgcggaagatcccagtttcactcttctccctttcataagctctgaaaggaagtgtaggaagtatgccaagttgttattcaactctagtatttaatcaagcattacctgggcacttctgaaattctccagcttctaaagtgagagtaaaccagagagaacacagggtggaaactacttaatcgagaaggctcctaggataagtgaggatcacatggccattctcaggccccagttcctctccaaactcctgaaagtcagcaagaaaccgaatctcagtcatgatgattatttttcatgtaacacctcacagcgttctcagggatcccaatatatgctactaattcactttgtgttaagtaggagtttcttaaaaaaacaatttcagtggagaaattcctgctataccagatgactttgccaaaatctttgtcctttttttcacttagggtgaaaaaaaaaattgatgacccgtgttttgctaccactgacgagagtaataccttgtcccaaagctaaaacgatcaacctatgaaaactggagggttgggcttttgttgttgttgttaaaggcctgaatgaggtgatatcttcgccggtggcaggtggaaaggcgagcggcatggagcgcgtaataagagagttggagtcggaaagagcagccccagtcgccggggaagcgggaggtcagtgcgggctccggcggcccccaggctccgagcgcccgcccgcggccccggcccggcccctagcccccgccgcccgcgcccgccccgggtcgcccctctggccccgggtccgagccatgcgtctctgagcgccccgagcgcgcccccgccccggaccgtgcccgggccccggcgcccccagcccggcgccgcccaccggtcgctagccaccatggctgaagcccctcctagaaggcttggactgggacctcctcctggggatgctcctagagctgaactggtggctctgacagccgtgcagtctgaacaaggcgaagctggtggcggcggatctccacgtagacttggactgctgggaagccctcttcctcctggtgctccacttcctggacctggcagtggatctggatctgcctgtggccagagaagctctgccgctcacaagagataccggcggctgcagaactgggtgtacaacgtgctggaaagacccagaggctgggccttcgtgtaccacgtgttcatctttctgctggtgttcagctgcctggtgctgtccgtgctgagcaccatccaagaacatcaagagctggctaacgagtgcctgttaatactggagtttgtgatgattgtggtgttcggcctcgagtacatcgtccgcgtttggagcgccggctgctgctgcagatatagaggttggcaaggcagattccgcttcgccagaaagcccttctgcgtgatcgacttcatcgtgttcgtggccagcgtggccgtgattgctgctggcacacagggcaacatcttcgccacaagcgccctgcggagcatgcggtttctgcagatcctgagaatggtccgaatggacagaagaggcggcacctggaagctgctgggctctgtggtgtacgcccacagcaaagagctgatcaccgcctggtacatcggatttctggtgctgatcttcgcctccttcctggtgtacctggccgagaaggacgccaacagcgactttagcagctacgccgactctctttggtggggcaccatcacactgaccaccatcggctacggcgacaagacccctcacacatggctgggaagagtgctggccgctggatttgctctgctgggcatcagctttttcgccctgcctgccggaatcctcggatctggctttgccctgaaggtgcaagagcagcaccggcagaagcacttcgagaagagaagaatgcctgccgccaacctgattcaggccgcttggagactgtacagcaccgacatgagcagagcctacctgaccgccacgtggtattattacgactcgatcctgcctagcttccgcgaactggccctgctgtttgagcatgtgcagagagccagaaacggcggcctcagacctctggaagttcggagagcacctgtgcctgatggcgccccttctagatatcctccagtggccacctgtcacagacccggcagcacatctttttgccctggcgagtctagccggatgggcatcaaggacagaatcagaatgggcagcagccagcggagaacaggcccttctaaacagcatctggcccctccaaccatgcctacaagccctagctctgagcaagtgggcgaagccacctctcctaccaaggtgcagaagtcctggtccttcaacgaccggaccagattcagagccagcctgagactgaagcccagaacctctgccgaggatgccccttctgaagaggtggccgaagagaagtcctaccagtgcgagctgaccgtggacgacatcatgccagccgtgaaaaccgtgatacggtctatccggatcctgaagttcctggtggccaagcggaagttcaaagagacactgcggccctacgacgtgaaggacgtgatcgagcagtattctgccggccacctggacatgctgggcagaatcaagagcctgcagaccagagtggaccagatcgttggaagaggcccaggcgacagaaaggccagagagaagggcgataagggcccatctgatgccgaggttgtcgacgagatatcaatgatgggcagagtggtcaaggtggaaaaacaggtgcagagcatcgagcacaagctggacctgctgctgggattctacagccggtgtctgagaagcggcacatctgcatctctgggcgctgtgcaggtcccactgttcgaccctgatatcaccagcgactatcacagccccgtggaccacgaggacatctccgtttctgctcagaccctgagcatcagcagatccgtgtccaccaacatggacggatcccgggctgactacaaagaccatgacggtgattataaagatcatgacatcgactacaaggatgacgatgacaagtaataagagctcgctgatcagcctcgactgtgccttctagttgccagccatctgttgtttgcccctcccccgtgccttccttgaccctggaaggtgccactcccactgtcctttcctaataaaatgaggaaattgcatcgcattgtctgagtaggtgtcattctattctggggggtggggtggggcaggacagcaagggggaggattgggaagacaatagcaggcatgctggggatgcggtgggctctatgttaattcggaccgctaggaacccctagtgatggagttggccactccctctctgcgcgctcgctcgctcactgaggccgggcgaccaaaggtcgcccgacgcccgggctttgcccgggcggcctcagtgagcgagcgagcgcgcagctgcctgcagg

SEQ ID NO: 348 - DNA, 4005 bp, synthetic construct
  misc_feature 1..4005: note = Description of Artificial Sequence: Syntheticpolynucleotide
  source 1..4005: mol_type = other DNA
cctgcaggcagctgcgcgctcgctcgctcactgaggccgcccgggcgtcgggcgacctttggtcgcccggcctcagtgagcgagcgagcgcgcagagagggagtggccaactccatcactaggggttcctgcggccgcacgcgtgacccattattcaatgggagttgtcaggatgtcagcaatgtacaaaatcattgcttaatttgtttgacaatggaaatggccattatggtttttatgtaactttgcttctgttacataattcttgctgacacggtgtttcaaccaaggtacttggtagcaagtgttgtacagaaaaggatctgtaagtggtttatgtggtcatcaaccacagcaaagatttcatctgagctgtgctatgaagaatgtagcttgagaaacacaaaatgtatcactgggcaaaaaggaagcagaagaaaaatacagttctgctaatgagagctctgactggtatctggagtataagatgggcccagccaatgctgagtgaatgaatgaaatgccttttgcctacttcacaatgtcacctagggcacccggtgccaacttcacaatatcacccaaggcataacttttgactacttcacaatgtcacttttaactgaccccacacagaaatggggactccacagaaacgtaggagtgtgtctagtgtcagccccgtctgaatcactctcctgtggtggctccagccaacgaagaggaagcaaaaaggataaaaaatctgagctacagcgcatggatttaggttaaacagcctgggaatgaggggtacgctaatcgctgaggaaaacgcacctgtggaggcctctccagaaacagcagaggatccgagctgcgtgtaggcagggcgcgcatgtcaccctggcccgggcgcctggtccgctgctggagataaatggtcgaccccggagggagaggctagtaggggtgttgatgtgaactgattcgcccaagccttgggccgcaaaactgcgaaagaaagcggcaggcagcctctgcatttcccagaagtgcagctggggaactttcccagaccggcccaggggttgctagagggtcagacgtaaaggatccgcctttcctaggcggggtgggccccaggcccgccggtggcaggtggaaaggcgagcggcatggagcgcgtaataagagagttggagtcggaaagagcagccccagtcgccggggaagcgggaggtcagtgcgggctccggcggcccccaggctccgagcgcccgcccgcggccccggcccggcccctagcccccgccgcccgcgcccgccccgggtcgcccctctggccccgggtccgagccatgcgtctctgagcgccccgagcgcgcccccgccccggaccgtgcccgggccccggcgcccccagcccggcgccgcccaccggtcgctagccaccatggctgaagcccctcctagaaggcttggactgggacctcctcctggggatgctcctagagctgaactggtggctctgacagccgtgcagtctgaacaaggcgaagctggtggcggcggatctccacgtagacttggactgctgggaagccctcttcctcctggtgctccacttcctggacctggcagtggatctggatctgcctgtggccagagaagctctgccgctcacaagagataccggcggctgcagaactgggtgtacaacgtgctggaaagacccagaggctgggccttcgtgtaccacgtgttcatctttctgctggtgttcagctgcctggtgctgtccgtgctgagcaccatccaagaacatcaagagctggctaacgagtgcctgttaatactggagtttgtgatgattgtggtgttcggcctcgagtacatcgtccgcgtttggagcgccggctgctgctgcagatatagaggttggcaaggcagattccgcttcgccagaaagcccttctgcgtgatcgacttcatcgtgttcgtggccagcgtggccgtgattgctgctggcacacagggcaacatcttcgccacaagcgccctgcggagcatgcggtttctgcagatcctgagaatggtccgaatggacagaagaggcggcacctggaagctgctgggctctgtggtgtacgcccacagcaaagagctgatcaccgcctggtacatcggatttctggtgctgatcttcgcctccttcctggtgtacctggccgagaaggacgccaacagcgactttagcagctacgccgactctctttggtggggcaccatcacactgaccaccatcggctacggcgacaagacccctcacacatggctgggaagagtgctggccgctggatttgctctgctgggcatcagctttttcgccctgcctgccggaatcctcggatctggctttgccctgaaggtgcaagagcagcaccggcagaagcacttcgagaagagaagaatgcctgccgccaacctgattcaggccgcttggagactgtacagcaccgacatgagcagagcctacctgaccgccacgtggtattattacgactcgatcctgcctagcttccgcgaactggccctgctgtttgagcatgtgcagagagccagaaacggcggcctcagacctctggaagttcggagagcacctgtgcctgatggcgccccttctagatatcctccagtggccacctgtcacagacccggcagcacatctttttgccctggcgagtctagccggatgggcatcaaggacagaatcagaatgggcagcagccagcggagaacaggcccttctaaacagcatctggcccctccaaccatgcctacaagccctagctctgagcaagtgggcgaagccacctctcctaccaaggtgcagaagtcctggtccttcaacgaccggaccagattcagagccagcctgagactgaagcccagaacctctgccgaggatgccccttctgaagaggtggccgaagagaagtcctaccagtgcgagctgaccgtggacgacatcatgccagccgtgaaaaccgtgatacggtctatccggatcctgaagttcctggtggccaagcggaagttcaaagagacactgcggccctacgacgtgaaggacgtgatcgagcagtattctgccggccacctggacatgctgggcagaatcaagagcctgcagaccagagtggaccagatcgttggaagaggcccaggcgacagaaaggccagagagaagggcgataagggcccatctgatgccgaggttgtcgacgagatatcaatgatgggcagagtggtcaaggtggaaaaacaggtgcagagcatcgagcacaagctggacctgctgctgggattctacagccggtgtctgagaagcggcacatctgcatctctgggcgctgtgcaggtcccactgttcgaccctgatatcaccagcgactatcacagccccgtggaccacgaggacatctccgtttctgctcagaccctgagcatcagcagatccgtgtccaccaacatggacggatcccgggctgactacaaagaccatgacggtgattataaagatcatgacatcgactacaaggatgacgatgacaagtaataagagctcgctgatcagcctcgactgtgccttctagttgccagccatctgttgtttgcccctcccccgtgccttccttgaccctggaaggtgccactcccactgtcctttcctaataaaatgaggaaattgcatcgcattgtctgagtaggtgtcattctattctggggggtggggtggggcaggacagcaagggggaggattgggaagacaatagcaggcatgctggggatgcggtgggctctatgttaattcggaccgctaggaacccctagtgatggagttggccactccctctctgcgcgctcgctcgctcactgaggccgggcgaccaaaggtcgcccgacgcccgggctttgcccgggcggcctcagtgagcgagcgagcgcgcagctgcctgcagg

SEQ ID NO: 349 - DNA, 4437 bp, synthetic construct
  misc_feature 1..4437: note = Description of Artificial Sequence: Syntheticpolynucleotide
  source 1..4437: mol_type = other DNA
cctgcaggcagctgcgcgctcgctcgctcactgaggccgcccgggcgtcgggcgacctttggtcgcccggcctcagtgagcgagcgagcgcgcagagagggagtggccaactccatcactaggggttcctgcggccgcacgcgtccaataaatgttggctcttgttttttctgacctgtatgttttgtctttgttccaaagctagccttacctctcccacatactggggttaattcatgctttggcccttatcaccttttccaatttatttcaaaattacatgctctattttaatatttgctttcttttttttattttgaaaacttattgaacttgcatctacactttaaaatgaagcagaacttaaagaactcaaagattatgaagaagactcagtacctgggaataaaattgagaataggttccttttatgactatataaccaatctcaaccattattttttgcttccccaaattaggagagtttaaaatgcagattctccccactctcctcttcccattcaatagaaactgagaaagaaggatcttattcaggtcttcactccatttgtgattcatattcagtggctgaaaggttagaaagcattcactccaccaataatgatcaagcacccataaagtaccaggagctcttacaaactctagggaaatcctggctcctgttgtcatgaattttgcattctcaggtaggaaatgtggctctgatgcctgctggggcagtgtacacttagagctacagaggatcttggaggtaatctaaaacctttctaaagagcaccctgcaatcacaccttctagcaacagccatttctcttgaattagtaaggtggctacaccgccaatttgagctgttctccttcagtcctgtagtccatcgccaggggagtctccaaatgctaataaaaatcaatttcccagacaaaagaacatagagggtcagggagcatctgacggacgtttttaaaggaaggggacagctacttccatgggactgcattttagttgtgctaaaagtgatgaaagtgggtttgcattattctaccaccaacacccaaaccacctgcccacggaaacccccgccggagaccgaagtttacccaaatagcgctcggcaaagcgctgccataaattcaaaactaactctgccgggcccgcgggggttgcgagacagggaccgaacgtgaaacccggggagccccgcgtctcttgcctccgaaggttttccgtgatcagtgtccccttctctgctggagtcggaagtgcctgtcacctgcggatctgcccgactctcccggtcggcccttcttctctgcccagttcggacagtctcgaattccccgtcgcagccccggccacctcggactccctggtccccagcccccgccccaccccccgcctccaccacgtcccctccccgcggtcccagcctctccaggcgctgctgggctctgattggcggctgcgctgacagcaggcggggcctggaagtcgcggccaagcccgccctcgcgtataagcccctctcagcgctctctctcccgccggtggcaggtggaaaggcgagcggcatggagcgcgtaataagagagttggagtcggaaagagcagccccagtcgccggggaagcgggaggtcagtgcgggctccggcggcccccaggctccgagcgcccgcccgcggccccggcccggcccctagcccccgccgcccgcgcccgccccgggtcgcccctctggccccgggtccgagccatgcgtctctgagcgccccgagcgcgcccccgccccggaccgtgcccgggccccggcgcccccagcccggcgccgcccaccggtcgctagccaccatggctgaagcccctcctagaaggcttggactgggacctcctcctggggatgctcctagagctgaactggtggctctgacagccgtgcagtctgaacaaggcgaagctggtggcggcggatctccacgtagacttggactgctgggaagccctcttcctcctggtgctccacttcctggacctggcagtggatctggatctgcctgtggccagagaagctctgccgctcacaagagataccggcggctgcagaactgggtgtacaacgtgctggaaagacccagaggctgggccttcgtgtaccacgtgttcatctttctgctggtgttcagctgcctggtgctgtccgtgctgagcaccatccaagaacatcaagagctggctaacgagtgcctgttaatactggagtttgtgatgattgtggtgttcggcctcgagtacatcgtccgcgtttggagcgccggctgctgctgcagatatagaggttggcaaggcagattccgcttcgccagaaagcccttctgcgtgatcgacttcatcgtgttcgtggccagcgtggccgtgattgctgctggcacacagggcaacatcttcgccacaagcgccctgcggagcatgcggtttctgcagatcctgagaatggtccgaatggacagaagaggcggcacctggaagctgctgggctctgtggtgtacgcccacagcaaagagctgatcaccgcctggtacatcggatttctggtgctgatcttcgcctccttcctggtgtacctggccgagaaggacgccaacagcgactttagcagctacgccgactctctttggtggggcaccatcacactgaccaccatcggctacggcgacaagacccctcacacatggctgggaagagtgctggccgctggatttgctctgctgggcatcagctttttcgccctgcctgccggaatcctcggatctggctttgccctgaaggtgcaagagcagcaccggcagaagcacttcgagaagagaagaatgcctgccgccaacctgattcaggccgcttggagactgtacagcaccgacatgagcagagcctacctgaccgccacgtggtattattacgactcgatcctgcctagcttccgcgaactggccctgctgtttgagcatgtgcagagagccagaaacggcggcctcagacctctggaagttcggagagcacctgtgcctgatggcgccccttctagatatcctccagtggccacctgtcacagacccggcagcacatctttttgccctggcgagtctagccggatgggcatcaaggacagaatcagaatgggcagcagccagcggagaacaggcccttctaaacagcatctggcccctccaaccatgcctacaagccctagctctgagcaagtgggcgaagccacctctcctaccaaggtgcagaagtcctggtccttcaacgaccggaccagattcagagccagcctgagactgaagcccagaacctctgccgaggatgccccttctgaagaggtggccgaagagaagtcctaccagtgcgagctgaccgtggacgacatcatgccagccgtgaaaaccgtgatacggtctatccggatcctgaagttcctggtggccaagcggaagttcaaagagacactgcggccctacgacgtgaaggacgtgatcgagcagtattctgccggccacctggacatgctgggcagaatcaagagcctgcagaccagagtggaccagatcgttggaagaggcccaggcgacagaaaggccagagagaagggcgataagggcccatctgatgccgaggttgtcgacgagatatcaatgatgggcagagtggtcaaggtggaaaaacaggtgcagagcatcgagcacaagctggacctgctgctgggattctacagccggtgtctgagaagcggcacatctgcatctctgggcgctgtgcaggtcccactgttcgaccctgatatcaccagcgactatcacagccccgtggaccacgaggacatctccgtttctgctcagaccctgagcatcagcagatccgtgtccaccaacatggacggatcccgggctgactacaaagaccatgacggtgattataaagatcatgacatcgactacaaggatgacgatgacaagtaataagagctcgctgatcagcctcgactgtgccttctagttgccagccatctgttgtttgcccctcccccgtgccttccttgaccctggaaggtgccactcccactgtcctttcctaataaaatgaggaaattgcatcgcattgtctgagtaggtgtcattctattctggggggtggggtggggcaggacagcaagggggaggattgggaagacaatagcaggcatgctggggatgcggtgggctctatgttaattcggaccgctaggaacccctagtgatggagttggccactccctctctgcgcgctcgctcgctcactgaggccgggcgaccaaaggtcgcccgacgcccgggctttgcccgggcggcctcagtgagcgagcgagcgcgcagctgcctgcagg

SEQ ID NO: 350 - DNA, 4318 bp, synthetic construct
  misc_feature 1..4318: note = Description of Artificial Sequence: Syntheticpolynucleotide
  source 1..4318: mol_type = other DNA
cctgcaggcagctgcgcgctcgctcgctcactgaggccgcccgggcgtcgggcgacctttggtcgcccggcctcagtgagcgagcgagcgcgcagagagggagtggccaactccatcactaggggttcctgcggccgcacgcgtccttgaatatttatgtccattttaacacttcctggttgcaagagggatgtgcctccattatttcctccacagttttggtatttgtcagacatttgttctgctgtctttctaatccagccaacgtctgctcaggaagtggggccagctccactgggacccatagttttacttccttgtcatttgattggatagtttccaaggaagcccctccagattggcactatctcagaaaaggagagcttgttgtgaaacactgcttcctgaaacttcctgctattgcctaaagctacgtctgaaactgagtagggaaaggcatacttttccagggacttagggggataggctttgaggtctctcctcgtgttgactctatgcaatcttcatagcaccagttttacacattccttctctgaaattaaagccagatggagcctctaggcttagcaagtggctttagatagccaccagaggggacttgcaagctgtcctctatcctactcccaagatcagtctgccctttcccctaggaataggcaggaaaagaataaaggaaagaaaggactggcgagcaggtgagggtgggggcttgctctaccctcaacatttacacaccatgaggaagaggccccctacagcagagaagggcagatgacaggagcagccctcgagggcaccaccaatttcagtgatggaaaaactcccccatcccacccttagacctccagtctcccagccaagccctagctccgggcgagatgcgttctcttcagaaaaacgctgagaattctcagcttccagagacagcgagtccctcgtttcgggcgatgtccctggccacctggcggtgccatccctcccctgagactaagcgggatatgggacgtgtgcaggagccgggatatggggggccgggtcggtggtaacagggaaacggagactgctgtggagcagtaggcggagactagagctccggaaaaggtcgctacagggacgggggtgagagctgagagacaccgagtgaggagcacagagataacccgcctgatctcaaggcccagctttcgcgaggtgtggagcctgtagctaacctaggagtctccgtccgccagcaatgccgcaggactaaaaagatcccctcaaaaatctcttcattgagcccccacctcctcgagtcccgctccggccggtcgagcagccaatcgcctcgcggggcggggttgcggcgagctgccgtaaccaatagaggtggagggggcggggcctggctcccggcgcgcggcggtagggtcgcctccggcgccggtggcaggtggaaaggcgagcggcatggagcgcgtaataagagagttggagtcggaaagagcagccccagtcgccggggaagcgggaggtcagtgcgggctccggcggcccccaggctccgagcgcccgcccgcggccccggcccggcccctagcccccgccgcccgcgcccgccccgggtcgcccctctggccccgggtccgagccatgcgtctctgagcgccccgagcgcgcccccgccccggaccgtgcccgggccccggcgcccccagcccggcgccgcccaccggtcgctagccaccatggctgaagcccctcctagaaggcttggactgggacctcctcctggggatgctcctagagctgaactggtggctctgacagccgtgcagtctgaacaaggcgaagctggtggcggcggatctccacgtagacttggactgctgggaagccctcttcctcctggtgctccacttcctggacctggcagtggatctggatctgcctgtggccagagaagctctgccgctcacaagagataccggcggctgcagaactgggtgtacaacgtgctggaaagacccagaggctgggccttcgtgtaccacgtgttcatctttctgctggtgttcagctgcctggtgctgtccgtgctgagcaccatccaagaacatcaagagctggctaacgagtgcctgttaatactggagtttgtgatgattgtggtgttcggcctcgagtacatcgtccgcgtttggagcgccggctgctgctgcagatatagaggttggcaaggcagattccgcttcgccagaaagcccttctgcgtgatcgacttcatcgtgttcgtggccagcgtggccgtgattgctgctggcacacagggcaacatcttcgccacaagcgccctgcggagcatgcggtttctgcagatcctgagaatggtccgaatggacagaagaggcggcacctggaagctgctgggctctgtggtgtacgcccacagcaaagagctgatcaccgcctggtacatcggatttctggtgctgatcttcgcctccttcctggtgtacctggccgagaaggacgccaacagcgactttagcagctacgccgactctctttggtggggcaccatcacactgaccaccatcggctacggcgacaagacccctcacacatggctgggaagagtgctggccgctggatttgctctgctgggcatcagctttttcgccctgcctgccggaatcctcggatctggctttgccctgaaggtgcaagagcagcaccggcagaagcacttcgagaagagaagaatgcctgccgccaacctgattcaggccgcttggagactgtacagcaccgacatgagcagagcctacctgaccgccacgtggtattattacgactcgatcctgcctagcttccgcgaactggccctgctgtttgagcatgtgcagagagccagaaacggcggcctcagacctctggaagttcggagagcacctgtgcctgatggcgccccttctagatatcctccagtggccacctgtcacagacccggcagcacatctttttgccctggcgagtctagccggatgggcatcaaggacagaatcagaatgggcagcagccagcggagaacaggcccttctaaacagcatctggcccctccaaccatgcctacaagccctagctctgagcaagtgggcgaagccacctctcctaccaaggtgcagaagtcctggtccttcaacgaccggaccagattcagagccagcctgagactgaagcccagaacctctgccgaggatgccccttctgaagaggtggccgaagagaagtcctaccagtgcgagctgaccgtggacgacatcatgccagccgtgaaaaccgtgatacggtctatccggatcctgaagttcctggtggccaagcggaagttcaaagagacactgcggccctacgacgtgaaggacgtgatcgagcagtattctgccggccacctggacatgctgggcagaatcaagagcctgcagaccagagtggaccagatcgttggaagaggcccaggcgacagaaaggccagagagaagggcgataagggcccatctgatgccgaggttgtcgacgagatatcaatgatgggcagagtggtcaaggtggaaaaacaggtgcagagcatcgagcacaagctggacctgctgctgggattctacagccggtgtctgagaagcggcacatctgcatctctgggcgctgtgcaggtcccactgttcgaccctgatatcaccagcgactatcacagccccgtggaccacgaggacatctccgtttctgctcagaccctgagcatcagcagatccgtgtccaccaacatggacggatcccgggctgactacaaagaccatgacggtgattataaagatcatgacatcgactacaaggatgacgatgacaagtaataagagctcgctgatcagcctcgactgtgccttctagttgccagccatctgttgtttgcccctcccccgtgccttccttgaccctggaaggtgccactcccactgtcctttcctaataaaatgaggaaattgcatcgcattgtctgagtaggtgtcattctattctggggggtggggtggggcaggacagcaagggggaggattgggaagacaatagcaggcatgctggggatgcggtgggctctatgttaattcggaccgctaggaacccctagtgatggagttggccactccctctctgcgcgctcgctcgctcactgaggccgggcgaccaaaggtcgcccgacgcccgggctttgcccgggcggcctcagtgagcgagcgagcgcgcagctgcctgcagg

SEQ ID NO: 351 - DNA, 4304 bp, synthetic construct
  misc_feature 1..4304: note = Description of Artificial Sequence: Syntheticpolynucleotide
  source 1..4304: mol_type = other DNA
cctgcaggcagctgcgcgctcgctcgctcactgaggccgcccgggcgtcgggcgacctttggtcgcccggcctcagtgagcgagcgagcgcgcagagagggagtggccaactccatcactaggggttcctgcggccgcacgcgtaggcatgagccactatgcccaaatgagaaataattttgtatgaaaaataatcttgtatggtaaatttagaccaagaataaaatgagtggttgtataagaaagaaagatgttcagaacaaaccaaaaagtccaagcatgtcacgaatggtctgtgtaagtcataataaaaggatttatctaaaaaaaccaaaaacttttatatgatcaagtcgtctataattaaaggaaaattataatgggtttttctagacattgggtgtgatgtaatgaaacgtacacactaaagaattcattacaaggctttcatgttttgttttttgtttgtttgactggtttgttgttgttgttgttgttgttgttgttgtttttgagacggagtttcgctcttgttgcccaggctggagtacaatggcgcgatctaggctcaccacaacctctgcctcccgggttcaagcgattctcctgcatcatcctcccgagtagctgggatgacaggcatgcgccaccatgcccggctaattttgtatttttagtagagacgggggtttctcatgttggtcaggctagtctcgaactcccgacctccggtgatccgcccgcctcggcctcccaaagtgctgggattataggcgtgagccaccgcgcccagccgcgcccggtttttgttgttgtttttgtttctaaaaacagcgtctcgctctgtggcccaggcaggggtgcagtggcgcgatctcagctcactgcagcctggaactcctggggtcaagcggtcttcccacctaagcctctccgtgctgggactccggacgcgctccacctcacgcagccgtattcctgctttcaaagcagatggaagaggtgcgccaggacccccagttcttggaaacagacctctccagttacctgttgtttcctcttcacgaagagtgcatgtaacagtaagacacaactgtttcatattatacgtaaagagttcatgccaaaggttatagacagtcacatgctaaaactaggctacactttgaagaatcaccgctcaagttctggaaaaaagaggtgactgttgaacaacactgtgagggtaatcgatgccactgaaatatacacttaaattgattaaagtggcgaattttatctggcatatattaccaccatttttagaaatgttttttggcaggtgaagaaaagcaaggctccaggaggccctgcgcaccggtctacgcccactaactcacccgccccctgcgccgcgtctcccctctcaatttcagtcgcccattgatcgccggtggcaggtggaaaggcgagcggcatggagcgcgtaataagagagttggagtcggaaagagcagccccagtcgccggggaagcgggaggtcagtgcgggctccggcggcccccaggctccgagcgcccgcccgcggccccggcccggcccctagcccccgccgcccgcgcccgccccgggtcgcccctctggccccgggtccgagccatgcgtctctgagcgccccgagcgcgcccccgccccggaccgtgcccgggccccggcgcccccagcccggcgccgcccaccggtcgctagccaccatggctgaagcccctcctagaaggcttggactgggacctcctcctggggatgctcctagagctgaactggtggctctgacagccgtgcagtctgaacaaggcgaagctggtggcggcggatctccacgtagacttggactgctgggaagccctcttcctcctggtgctccacttcctggacctggcagtggatctggatctgcctgtggccagagaagctctgccgctcacaagagataccggcggctgcagaactgggtgtacaacgtgctggaaagacccagaggctgggccttcgtgtaccacgtgttcatctttctgctggtgttcagctgcctggtgctgtccgtgctgagcaccatccaagaacatcaagagctggctaacgagtgcctgttaatactggagtttgtgatgattgtggtgttcggcctcgagtacatcgtccgcgtttggagcgccggctgctgctgcagatatagaggttggcaaggcagattccgcttcgccagaaagcccttctgcgtgatcgacttcatcgtgttcgtggccagcgtggccgtgattgctgctggcacacagggcaacatcttcgccacaagcgccctgcggagcatgcggtttctgcagatcctgagaatggtccgaatggacagaagaggcggcacctggaagctgctgggctctgtggtgtacgcccacagcaaagagctgatcaccgcctggtacatcggatttctggtgctgatcttcgcctccttcctggtgtacctggccgagaaggacgccaacagcgactttagcagctacgccgactctctttggtggggcaccatcacactgaccaccatcggctacggcgacaagacccctcacacatggctgggaagagtgctggccgctggatttgctctgctgggcatcagctttttcgccctgcctgccggaatcctcggatctggctttgccctgaaggtgcaagagcagcaccggcagaagcacttcgagaagagaagaatgcctgccgccaacctgattcaggccgcttggagactgtacagcaccgacatgagcagagcctacctgaccgccacgtggtattattacgactcgatcctgcctagcttccgcgaactggccctgctgtttgagcatgtgcagagagccagaaacggcggcctcagacctctggaagttcggagagcacctgtgcctgatggcgccccttctagatatcctccagtggccacctgtcacagacccggcagcacatctttttgccctggcgagtctagccggatgggcatcaaggacagaatcagaatgggcagcagccagcggagaacaggcccttctaaacagcatctggcccctccaaccatgcctacaagccctagctctgagcaagtgggcgaagccacctctcctaccaaggtgcagaagtcctggtccttcaacgaccggaccagattcagagccagcctgagactgaagcccagaacctctgccgaggatgccccttctgaagaggtggccgaagagaagtcctaccagtgcgagctgaccgtggacgacatcatgccagccgtgaaaaccgtgatacggtctatccggatcctgaagttcctggtggccaagcggaagttcaaagagacactgcggccctacgacgtgaaggacgtgatcgagcagtattctgccggccacctggacatgctgggcagaatcaagagcctgcagaccagagtggaccagatcgttggaagaggcccaggcgacagaaaggccagagagaagggcgataagggcccatctgatgccgaggttgtcgacgagatatcaatgatgggcagagtggtcaaggtggaaaaacaggtgcagagcatcgagcacaagctggacctgctgctgggattctacagccggtgtctgagaagcggcacatctgcatctctgggcgctgtgcaggtcccactgttcgaccctgatatcaccagcgactatcacagccccgtggaccacgaggacatctccgtttctgctcagaccctgagcatcagcagatccgtgtccaccaacatggacggatcccgggctgactacaaagaccatgacggtgattataaagatcatgacatcgactacaaggatgacgatgacaagtaataagagctcgctgatcagcctcgactgtgccttctagttgccagccatctgttgtttgcccctcccccgtgccttccttgaccctggaaggtgccactcccactgtcctttcctaataaaatgaggaaattgcatcgcattgtctgagtaggtgtcattctattctggggggtggggtggggcaggacagcaagggggaggattgggaagacaatagcaggcatgctggggatgcggtgggctctatgttaattcggaccgctaggaacccctagtgatggagttggccactccctctctgcgcgctcgctcgctcactgaggccgggcgaccaaaggtcgcccgacgcccgggctttgcccgggcggcctcagtgagcgagcgagcgcgcagctgcctgcagg

SEQ ID NO: 352 - DNA, 4576 bp, synthetic construct
  misc_feature 1..4576: note = Description of Artificial Sequence: Syntheticpolynucleotide
  source 1..4576: mol_type = other DNA
cctgcaggcagctgcgcgctcgctcgctcactgaggccgcccgggcgtcgggcgacctttggtcgcccggcctcagtgagcgagcgagcgcgcagagagggagtggccaactccatcactaggggttcctgcggccgcacgcgtagggcccatcctggtgtaaacaaaccctttggcgcagcccaagagagcccctatctaatacccagcacgatccccttacatccggagcactctttaaacatttttcctagctgatcttcacagtgaccctgcaggggagacaggaagaggtatcatgatccctgtgttagcgtgggagggctagtgaagtgcagtgacttgcccaaggtcactccatgaattgagggtggaattgaaaccaaaacactgatctcctgaccccctgtgcatacacagttgctcttggagattggagacccctggaatctggagcagacaatctggctggcttccttgcagctcaggtctgcggaggccacaagggggcagcatgcagccctcacctgtgtctctgggacctttgaagggagggtcctccctaggataacagtgagagctggaaactctaccctctccagagtattgcctcaagatccctgaacttagctccatgttttcagaatgtgctagctacaattcctgaaatgcccttttacttcccttttcacttattgagctcctatacatccatcaaggcccaatttaaatggccctttcagcagctatttctttggcaccttctgtgtgtcagacgttgttttaaacattgtgaatacagcttaaaacaagtctgacgggtggaaaggaaactgctgagggtggggtcaggggaacaggtgggagagggaccagtcccctccagcagaggggccaattgagggagcctgagacagctgtttgctcagaaaagtgtcttagtcactaaaggttgtggtggggaaagtccgtcctcccagtcatgtcctgggaatccggatggcgcaggaaggccacccggtgaccctaagagtggccacctgtcctctctgaactggactttctcttctggcccttcccctccctccctccctcactggcgctcagcagatcaatgctgcctttgctgacagctgagaatcgagctcgccttcccgccccttcccccgcccctcccgctcggcttcgtccctcgagatcctcccggaggaaccgggaagagtttgctgcggaaggctcaccctggggcagggcctgcggagggagcggctggtgtggccgcagctttccgtggaggaagagggaaagaggatcgggaaacccaagttaccaaccctgtgcaggggagatggaggtcggggactaagaaaaactgctgcccacccagccacacacagcactgggcacactttaagcacccgcaccaggcacacagtgctcgaccccaacggacacacctcatcctgccgcccgcggccacaactccacattcacttgcacgcgtccggcttcccggccccgcgcgctgcccccgccacgcggttcggcccaggcaccaactcggccgcccgtgcgccctgccccgccgcctgctccgcgcgttccctccctccgcctcgcctcgcttgctcgctcgctccctcccgatttgggaaggcggccgcggggcgggcgggggaggggcggggcgggggagggtcgccggtggcaggtggaaaggcgagcggcatggagcgcgtaataagagagttggagtcggaaagagcagccccagtcgccggggaagcgggaggtcagtgcgggctccggcggcccccaggctccgagcgcccgcccgcggccccggcccggcccctagcccccgccgcccgcgcccgccccgggtcgcccctctggccccgggtccgagccatgcgtctctgagcgccccgagcgcgcccccgccccggaccgtgcccgggccccggcgcccccagcccggcgccgcccaccggtcgctagccaccatggctgaagcccctcctagaaggcttggactgggacctcctcctggggatgctcctagagctgaactggtggctctgacagccgtgcagtctgaacaaggcgaagctggtggcggcggatctccacgtagacttggactgctgggaagccctcttcctcctggtgctccacttcctggacctggcagtggatctggatctgcctgtggccagagaagctctgccgctcacaagagataccggcggctgcagaactgggtgtacaacgtgctggaaagacccagaggctgggccttcgtgtaccacgtgttcatctttctgctggtgttcagctgcctggtgctgtccgtgctgagcaccatccaagaacatcaagagctggctaacgagtgcctgttaatactggagtttgtgatgattgtggtgttcggcctcgagtacatcgtccgcgtttggagcgccggctgctgctgcagatatagaggttggcaaggcagattccgcttcgccagaaagcccttctgcgtgatcgacttcatcgtgttcgtggccagcgtggccgtgattgctgctggcacacagggcaacatcttcgccacaagcgccctgcggagcatgcggtttctgcagatcctgagaatggtccgaatggacagaagaggcggcacctggaagctgctgggctctgtggtgtacgcccacagcaaagagctgatcaccgcctggtacatcggatttctggtgctgatcttcgcctccttcctggtgtacctggccgagaaggacgccaacagcgactttagcagctacgccgactctctttggtggggcaccatcacactgaccaccatcggctacggcgacaagacccctcacacatggctgggaagagtgctggccgctggatttgctctgctgggcatcagctttttcgccctgcctgccggaatcctcggatctggctttgccctgaaggtgcaagagcagcaccggcagaagcacttcgagaagagaagaatgcctgccgccaacctgattcaggccgcttggagactgtacagcaccgacatgagcagagcctacctgaccgccacgtggtattattacgactcgatcctgcctagcttccgcgaactggccctgctgtttgagcatgtgcagagagccagaaacggcggcctcagacctctggaagttcggagagcacctgtgcctgatggcgccccttctagatatcctccagtggccacctgtcacagacccggcagcacatctttttgccctggcgagtctagccggatgggcatcaaggacagaatcagaatgggcagcagccagcggagaacaggcccttctaaacagcatctggcccctccaaccatgcctacaagccctagctctgagcaagtgggcgaagccacctctcctaccaaggtgcagaagtcctggtccttcaacgaccggaccagattcagagccagcctgagactgaagcccagaacctctgccgaggatgccccttctgaagaggtggccgaagagaagtcctaccagtgcgagctgaccgtggacgacatcatgccagccgtgaaaaccgtgatacggtctatccggatcctgaagttcctggtggccaagcggaagttcaaagagacactgcggccctacgacgtgaaggacgtgatcgagcagtattctgccggccacctggacatgctgggcagaatcaagagcctgcagaccagagtggaccagatcgttggaagaggcccaggcgacagaaaggccagagagaagggcgataagggcccatctgatgccgaggttgtcgacgagatatcaatgatgggcagagtggtcaaggtggaaaaacaggtgcagagcatcgagcacaagctggacctgctgctgggattctacagccggtgtctgagaagcggcacatctgcatctctgggcgctgtgcaggtcccactgttcgaccctgatatcaccagcgactatcacagccccgtggaccacgaggacatctccgtttctgctcagaccctgagcatcagcagatccgtgtccaccaacatggacggatcccgggctgactacaaagaccatgacggtgattataaagatcatgacatcgactacaaggatgacgatgacaagtaataagagctcgctgatcagcctcgactgtgccttctagttgccagccatctgttgtttgcccctcccccgtgccttccttgaccctggaaggtgccactcccactgtcctttcctaataaaatgaggaaattgcatcgcattgtctgagtaggtgtcattctattctggggggtggggtggggcaggacagcaagggggaggattgggaagacaatagcaggcatgctggggatgcggtgggctctatgttaattcggaccgctaggaacccctagtgatggagttggccactccctctctgcgcgctcgctcgctcactgaggccgggcgaccaaaggtcgcccgacgcccgggctttgcccgggcggcctcagtgagcgagcgagcgcgcagctgcctgcagg

SEQ ID NO: 353 - DNA, 4235 bp, synthetic construct
  misc_feature 1..4235: note = Description of Artificial Sequence: Syntheticpolynucleotide
  source 1..4235: mol_type = other DNA
cctgcaggcagctgcgcgctcgctcgctcactgaggccgcccgggcgtcgggcgacctttggtcgcccggcctcagtgagcgagcgagcgcgcagagagggagtggccaactccatcactaggggttcctgcggccgcacgcgtgtgaattcgatgatgtgcttgtgtggacatgtggaggtctcaagaacaaaagaagagctgggcctggcacacagtgggtgctaatgcctgttagaattgttgttgagagggcaggagggtgtaacatggacccagctatctgatcctgaggctgggcgccatgtgggtgtgaagtacaccaggggctccaaccagcaagtgctagctcaggttacagtcagctgcccctggaggaagctagcagacatcctgtgtacttgaaaagaaaactgaaagtgctatctgcatcctggtgatagtaacctctcttttctggctgttgaagtgcattcctgtgcggatgtggaaagagagaaagcaagatacagccagggctaggacaggaatgtgagtatttccttaattggacatgagagccttgaactgattccagttggagtgttttcttttagggcctggaccctaaagatttcatacagttttctttgtcagaaaaatccctttggttcaaaggcccctcgatagaaataaagaaaaagccagggctgaatttctttgatatgtgggaaggcaagagtttatgagctgccagatctcaggcttcttttggggtggaggattttgtctggtgggttcgggttgctttgtgttgttgactgctaattcactgatgaccaagtttctcaaataccttaaaaacaagccctacgtctgctcagtgctttccaatttaccaagtgttttcataacatttcttatgtacgcaaatgagtttcaccgaaaaattggctagaaacttcccttctcctactcacgttcatagtgtagctgtgaaaacaaacaaaaccacagaggcatggtaagtgtggtatggtggggaaaacaaagccattttacaggcgtgattgaagcggaggccacagagcggcagcgctgggtcccgagtgagactcccatcatgtggctcaatggaaaaatcctacccaggacgacaccacatccttgctcccacaaataaaaccttccacggaactcagggctgcagacgcagagccgagcgcgcccccgagccgccgcccgccggagctgcgagcgctgaagccattcatgattttggtgacgttattccaggagtgggcgagggagggcggggcctctcggggccaagccccgcccccgcccctataaatacggcttcccgggctctttgtgggcgccggtggcaggtggaaaggcgagcggcatggagcgcgtaataagagagttggagtcggaaagagcagccccagtcgccggggaagcgggaggtcagtgcgggctccggcggcccccaggctccgagcgcccgcccgcggccccggcccggcccctagcccccgccgcccgcgcccgccccgggtcgcccctctggccccgggtccgagccatgcgtctctgagcgccccgagcgcgcccccgccccggaccgtgcccgggccccggcgcccccagcccggcgccgcccaccggtcgctagccaccatggctgaagcccctcctagaaggcttggactgggacctcctcctggggatgctcctagagctgaactggtggctctgacagccgtgcagtctgaacaaggcgaagctggtggcggcggatctccacgtagacttggactgctgggaagccctcttcctcctggtgctccacttcctggacctggcagtggatctggatctgcctgtggccagagaagctctgccgctcacaagagataccggcggctgcagaactgggtgtacaacgtgctggaaagacccagaggctgggccttcgtgtaccacgtgttcatctttctgctggtgttcagctgcctggtgctgtccgtgctgagcaccatccaagaacatcaagagctggctaacgagtgcctgttaatactggagtttgtgatgattgtggtgttcggcctcgagtacatcgtccgcgtttggagcgccggctgctgctgcagatatagaggttggcaaggcagattccgcttcgccagaaagcccttctgcgtgatcgacttcatcgtgttcgtggccagcgtggccgtgattgctgctggcacacagggcaacatcttcgccacaagcgccctgcggagcatgcggtttctgcagatcctgagaatggtccgaatggacagaagaggcggcacctggaagctgctgggctctgtggtgtacgcccacagcaaagagctgatcaccgcctggtacatcggatttctggtgctgatcttcgcctccttcctggtgtacctggccgagaaggacgccaacagcgactttagcagctacgccgactctctttggtggggcaccatcacactgaccaccatcggctacggcgacaagacccctcacacatggctgggaagagtgctggccgctggatttgctctgctgggcatcagctttttcgccctgcctgccggaatcctcggatctggctttgccctgaaggtgcaagagcagcaccggcagaagcacttcgagaagagaagaatgcctgccgccaacctgattcaggccgcttggagactgtacagcaccgacatgagcagagcctacctgaccgccacgtggtattattacgactcgatcctgcctagcttccgcgaactggccctgctgtttgagcatgtgcagagagccagaaacggcggcctcagacctctggaagttcggagagcacctgtgcctgatggcgccccttctagatatcctccagtggccacctgtcacagacccggcagcacatctttttgccctggcgagtctagccggatgggcatcaaggacagaatcagaatgggcagcagccagcggagaacaggcccttctaaacagcatctggcccctccaaccatgcctacaagccctagctctgagcaagtgggcgaagccacctctcctaccaaggtgcagaagtcctggtccttcaacgaccggaccagattcagagccagcctgagactgaagcccagaacctctgccgaggatgccccttctgaagaggtggccgaagagaagtcctaccagtgcgagctgaccgtggacgacatcatgccagccgtgaaaaccgtgatacggtctatccggatcctgaagttcctggtggccaagcggaagttcaaagagacactgcggccctacgacgtgaaggacgtgatcgagcagtattctgccggccacctggacatgctgggcagaatcaagagcctgcagaccagagtggaccagatcgttggaagaggcccaggcgacagaaaggccagagagaagggcgataagggcccatctgatgccgaggttgtcgacgagatatcaatgatgggcagagtggtcaaggtggaaaaacaggtgcagagcatcgagcacaagctggacctgctgctgggattctacagccggtgtctgagaagcggcacatctgcatctctgggcgctgtgcaggtcccactgttcgaccctgatatcaccagcgactatcacagccccgtggaccacgaggacatctccgtttctgctcagaccctgagcatcagcagatccgtgtccaccaacatggacggatcccgggctgactacaaagaccatgacggtgattataaagatcatgacatcgactacaaggatgacgatgacaagtaataagagctcgctgatcagcctcgactgtgccttctagttgccagccatctgttgtttgcccctcccccgtgccttccttgaccctggaaggtgccactcccactgtcctttcctaataaaatgaggaaattgcatcgcattgtctgagtaggtgtcattctattctggggggtggggtggggcaggacagcaagggggaggattgggaagacaatagcaggcatgctggggatgcggtgggctctatgttaattcggaccgctaggaacccctagtgatggagttggccactccctctctgcgcgctcgctcgctcactgaggccgggcgaccaaaggtcgcccgacgcccgggctttgcccgggcggcctcagtgagcgagcgagcgcgcagctgcctgcagg

SEQ ID NO: 354 - DNA, 4151 bp, synthetic construct
  misc_feature 1..4151: note = Description of Artificial Sequence: Syntheticpolynucleotide
  source 1..4151: mol_type = other DNA
cctgcaggcagctgcgcgctcgctcgctcactgaggccgcccgggcgtcgggcgacctttggtcgcccggcctcagtgagcgagcgagcgcgcagagagggagtggccaactccatcactaggggttcctgcggccgcacgcgtcactgccatctcaacatgtggtttctaggttgcctcaacagggaagagattgttggaggctcatttgctagctcttaaattctttggtcaaccacagtccattgaacagaactaatcacctgactgcaagagatctgggaaatgtgagaaacacctagatatctagtaagcaataaatatttcagttaccaaagccaaaccaaaaaaagagaaaaataattgtactttacaaagggaggcatctgggtcctgtgggagttttggggagtgaggatgtttcagagttctcaactcctgtggctatccatttcattttagcaggacatatgattaatttcttgttctggacctttgtaatttaaagtctgaatccttagcggcaagagaattgcttaatcaatggcttacaacagcagaacgtggactgccaggaaaatttccatcctgagttaagaaagaaggataatttattataagagggttgttacagaatgaagggcagaaattcagaaggattacaggatgggctggaaccacaaagcactgtctgctttttagactaggtgtggtatccttgatgggcaaagggaatattggtaaaattatttgtgacctgggttaagtcattccatttctctgggcttcaattcccctgtctataaaatgtttgagggagagaatggggaagggttctagggaaagaaggacagaataaaagtttgggtatatgaattactatttagagttggtataaagtgaaggcctttggggagatataccctgaccagaccagattattttgaatgaaatctctttctctgttccatgagcagttctgtgtgtagggagaacatttgaatggcctaatgagcaaatcacatttctctgggtctgtttccttatccataagttctgcatcactggctcctaactcaagcaatctccttgggtttctctgaggggcccctgggatcccctatcattagtccctctcacagaagcatacccttctccagagctaaaggatcagatattcagcggctcaggtaacaaacctgctgtcaggttacacatattgtttcctgaaagaccacactacagtgtcagtggagcctcaggttgcctgcagtcgccggtggcaggtggaaaggcgagcggcatggagcgcgtaataagagagttggagtcggaaagagcagccccagtcgccggggaagcgggaggtcagtgcgggctccggcggcccccaggctccgagcgcccgcccgcggccccggcccggcccctagcccccgccgcccgcgcccgccccgggtcgcccctctggccccgggtccgagccatgcgtctctgagcgccccgagcgcgcccccgccccggaccgtgcccgggccccggcgcccccagcccggcgccgcccaccggtcgctagccaccatggctgaagcccctcctagaaggcttggactgggacctcctcctggggatgctcctagagctgaactggtggctctgacagccgtgcagtctgaacaaggcgaagctggtggcggcggatctccacgtagacttggactgctgggaagccctcttcctcctggtgctccacttcctggacctggcagtggatctggatctgcctgtggccagagaagctctgccgctcacaagagataccggcggctgcagaactgggtgtacaacgtgctggaaagacccagaggctgggccttcgtgtaccacgtgttcatctttctgctggtgttcagctgcctggtgctgtccgtgctgagcaccatccaagaacatcaagagctggctaacgagtgcctgttaatactggagtttgtgatgattgtggtgttcggcctcgagtacatcgtccgcgtttggagcgccggctgctgctgcagatatagaggttggcaaggcagattccgcttcgccagaaagcccttctgcgtgatcgacttcatcgtgttcgtggccagcgtggccgtgattgctgctggcacacagggcaacatcttcgccacaagcgccctgcggagcatgcggtttctgcagatcctgagaatggtccgaatggacagaagaggcggcacctggaagctgctgggctctgtggtgtacgcccacagcaaagagctgatcaccgcctggtacatcggatttctggtgctgatcttcgcctccttcctggtgtacctggccgagaaggacgccaacagcgactttagcagctacgccgactctctttggtggggcaccatcacactgaccaccatcggctacggcgacaagacccctcacacatggctgggaagagtgctggccgctggatttgctctgctgggcatcagctttttcgccctgcctgccggaatcctcggatctggctttgccctgaaggtgcaagagcagcaccggcagaagcacttcgagaagagaagaatgcctgccgccaacctgattcaggccgcttggagactgtacagcaccgacatgagcagagcctacctgaccgccacgtggtattattacgactcgatcctgcctagcttccgcgaactggccctgctgtttgagcatgtgcagagagccagaaacggcggcctcagacctctggaagttcggagagcacctgtgcctgatggcgccccttctagatatcctccagtggccacctgtcacagacccggcagcacatctttttgccctggcgagtctagccggatgggcatcaaggacagaatcagaatgggcagcagccagcggagaacaggcccttctaaacagcatctggcccctccaaccatgcctacaagccctagctctgagcaagtgggcgaagccacctctcctaccaaggtgcagaagtcctggtccttcaacgaccggaccagattcagagccagcctgagactgaagcccagaacctctgccgaggatgccccttctgaagaggtggccgaagagaagtcctaccagtgcgagctgaccgtggacgacatcatgccagccgtgaaaaccgtgatacggtctatccggatcctgaagttcctggtggccaagcggaagttcaaagagacactgcggccctacgacgtgaaggacgtgatcgagcagtattctgccggccacctggacatgctgggcagaatcaagagcctgcagaccagagtggaccagatcgttggaagaggcccaggcgacagaaaggccagagagaagggcgataagggcccatctgatgccgaggttgtcgacgagatatcaatgatgggcagagtggtcaaggtggaaaaacaggtgcagagcatcgagcacaagctggacctgctgctgggattctacagccggtgtctgagaagcggcacatctgcatctctgggcgctgtgcaggtcccactgttcgaccctgatatcaccagcgactatcacagccccgtggaccacgaggacatctccgtttctgctcagaccctgagcatcagcagatccgtgtccaccaacatggacggatcccgggctgactacaaagaccatgacggtgattataaagatcatgacatcgactacaaggatgacgatgacaagtaataagagctcgctgatcagcctcgactgtgccttctagttgccagccatctgttgtttgcccctcccccgtgccttccttgaccctggaaggtgccactcccactgtcctttcctaataaaatgaggaaattgcatcgcattgtctgagtaggtgtcattctattctggggggtggggtggggcaggacagcaagggggaggattgggaagacaatagcaggcatgctggggatgcggtgggctctatgttaattcggaccgctaggaacccctagtgatggagttggccactccctctctgcgcgctcgctcgctcactgaggccgggcgaccaaaggtcgcccgacgcccgggctttgcccgggcggcctcagtgagcgagcgagcgcgcagctgcctgcagg

SEQ ID NO: 355 - DNA, 4827 bp, synthetic construct
  misc_feature 1..4827: note = Description of Artificial Sequence: Syntheticpolynucleotide
  source 1..4827: mol_type = other DNA
cctgcaggcagctgcgcgctcgctcgctcactgaggccgcccgggcgtcgggcgacctttggtcgcccggcctcagtgagcgagcgagcgcgcagagagggagtggccaactccatcactaggggttcctgcggccgcacgcgtgaagacatagttccagtctgagtctgaagcctgggacccatgagagctgaagacgtggtcccagtctgagtctgaagcctgagacccaggagagctgaagacgtggttccagtctgagtctgaagcctgagatccaggagagctaaggacatggttctagtctgagtctgaagcctgagacccaggagagctgatggtgtggttccagtctgagtctgaagcctgagacccaggagagctgaatacgtagttccagtctgagtctgaagcctgagttccaggagagctgaggacatggttccagtctgaatctgaagcctgagacccaggagagctgatggtgtggtctgaagacgtagttccagtctgagtctgaagcctgagacccaggagagctgaagatgtggtttcagtctgtctgaagcctgagacccaggagagctgatggtgtggttccagtctgagtctgaagtctgagacccaggagagctgaagatgtggttccagtctgagtctgaagcctgagacccagcagagctgaagacatggttccagtctgagtctgaagcctgagacccaggagagctgaagatgtggtttcagtctgtctgaagcctgagacccgggagagctgaagacgtagttccagtctgagtctgaagcctgagagacccaggagagctgatggtgtggttccagtctgagtctgaagcctgagacccaggagagctgaagatgtggtttcagtctgtctgaagcttgagacccaggggagctgaagatgtagttccagtctgagtctgaagcctgagacccaggagaggtgaagacgtggtttcagtctgagtcaaggcctgagaaccaggagagctgctggtgaaagttctagtgcaagggcagaagaccaatgtcctacctagctcaacagtcaggcaggcagaagttccctgtttctcagcctttttgttctattctgttcttcagttggttggatgaggcccctgcacattaaggatagacaaaaattcaacgcatgctttactaagtaccgtttgtatcagtgggtaaagcactgtgtttggtactctctcaaatgcaaagatgattacgacacatgtactatcgtttatgaatgggtggccaacagaacagattgccgcataggtaagcagaaatctgctctcattctctattggccacaagcaggcatgtcttaggagcagaagggtaggaagatctctaactgtgcttggaaacttggggagttaccacgtctggctaaagtggtattgtcttaaggaaaacctcttactactgggcagaggcaggggaaccctggtatgagttctggattacataggagatgtgacttggacacgtttggggcttaaaagtaggaagggatcaaggggggagatttgaaaatcccggtggaggtgcgaggtatccggggagaggtgggagcagaggccctgcagcttgccaagcacacacggccctagggcgcccagctgagacggcaccttggcacccgggcccgctgcagcccgctccggtcagctgcaccccagtcaggagcctttccagcgggtcggaggagaacggaagtttggggagacccgcgcgattcgcctggctgcattttacatttctttctccggcagctggggtcacgaaggctgctctcgccggcggtgttggaacgtggacacgtgcgctttggtaatagggcagcctcccccgcgggcgcagtccccgctgcgagcgcccccggctgctgaggcgggaccgaggacccggagatttcgccggtggcaggtggaaaggcgagcggcatggagcgcgtaataagagagttggagtcggaaagagcagccccagtcgccggggaagcgggaggtcagtgcgggctccggcggcccccaggctccgagcgcccgcccgcggccccggcccggcccctagcccccgccgcccgcgcccgccccgggtcgcccctctggccccgggtccgagccatgcgtctctgagcgccccgagcgcgcccccgccccggaccgtgcccgggccccggcgcccccagcccggcgccgcccaccggtcgctagccaccatggctgaagcccctcctagaaggcttggactgggacctcctcctggggatgctcctagagctgaactggtggctctgacagccgtgcagtctgaacaaggcgaagctggtggcggcggatctccacgtagacttggactgctgggaagccctcttcctcctggtgctccacttcctggacctggcagtggatctggatctgcctgtggccagagaagctctgccgctcacaagagataccggcggctgcagaactgggtgtacaacgtgctggaaagacccagaggctgggccttcgtgtaccacgtgttcatctttctgctggtgttcagctgcctggtgctgtccgtgctgagcaccatccaagaacatcaagagctggctaacgagtgcctgttaatactggagtttgtgatgattgtggtgttcggcctcgagtacatcgtccgcgtttggagcgccggctgctgctgcagatatagaggttggcaaggcagattccgcttcgccagaaagcccttctgcgtgatcgacttcatcgtgttcgtggccagcgtggccgtgattgctgctggcacacagggcaacatcttcgccacaagcgccctgcggagcatgcggtttctgcagatcctgagaatggtccgaatggacagaagaggcggcacctggaagctgctgggctctgtggtgtacgcccacagcaaagagctgatcaccgcctggtacatcggatttctggtgctgatcttcgcctccttcctggtgtacctggccgagaaggacgccaacagcgactttagcagctacgccgactctctttggtggggcaccatcacactgaccaccatcggctacggcgacaagacccctcacacatggctgggaagagtgctggccgctggatttgctctgctgggcatcagctttttcgccctgcctgccggaatcctcggatctggctttgccctgaaggtgcaagagcagcaccggcagaagcacttcgagaagagaagaatgcctgccgccaacctgattcaggccgcttggagactgtacagcaccgacatgagcagagcctacctgaccgccacgtggtattattacgactcgatcctgcctagcttccgcgaactggccctgctgtttgagcatgtgcagagagccagaaacggcggcctcagacctctggaagttcggagagcacctgtgcctgatggcgccccttctagatatcctccagtggccacctgtcacagacccggcagcacatctttttgccctggcgagtctagccggatgggcatcaaggacagaatcagaatgggcagcagccagcggagaacaggcccttctaaacagcatctggcccctccaaccatgcctacaagccctagctctgagcaagtgggcgaagccacctctcctaccaaggtgcagaagtcctggtccttcaacgaccggaccagattcagagccagcctgagactgaagcccagaacctctgccgaggatgccccttctgaagaggtggccgaagagaagtcctaccagtgcgagctgaccgtggacgacatcatgccagccgtgaaaaccgtgatacggtctatccggatcctgaagttcctggtggccaagcggaagttcaaagagacactgcggccctacgacgtgaaggacgtgatcgagcagtattctgccggccacctggacatgctgggcagaatcaagagcctgcagaccagagtggaccagatcgttggaagaggcccaggcgacagaaaggccagagagaagggcgataagggcccatctgatgccgaggttgtcgacgagatatcaatgatgggcagagtggtcaaggtggaaaaacaggtgcagagcatcgagcacaagctggacctgctgctgggattctacagccggtgtctgagaagcggcacatctgcatctctgggcgctgtgcaggtcccactgttcgaccctgatatcaccagcgactatcacagccccgtggaccacgaggacatctccgtttctgctcagaccctgagcatcagcagatccgtgtccaccaacatggacggatcccgggctgactacaaagaccatgacggtgattataaagatcatgacatcgactacaaggatgacgatgacaagtaataagagctcgctgatcagcctcgactgtgccttctagttgccagccatctgttgtttgcccctcccccgtgccttccttgaccctggaaggtgccactcccactgtcctttcctaataaaatgaggaaattgcatcgcattgtctgagtaggtgtcattctattctggggggtggggtggggcaggacagcaagggggaggattgggaagacaatagcaggcatgctggggatgcggtgggctctatgttaattcggaccgctaggaacccctagtgatggagttggccactccctctctgcgcgctcgctcgctcactgaggccgggcgaccaaaggtcgcccgacgcccgggctttgcccgggcggcctcagtgagcgagcgagcgcgcagctgcctgcagg
